United States Patent Application Publication US 2011/0191912 A1 - sequence listing, part 27

SEQ ID NO: 177703 - DNA, 11 bp, Unknown
  misc_feature (1)..( 11): Result.005 file - promoters50/1715347
tcttaaataac

SEQ ID NO: 177704 - DNA, 11 bp, Unknown
  misc_feature (1)..( 11): Result.005 file - promoters50/1715347
attttaattaa

SEQ ID NO: 177705 - DNA, 17 bp, Unknown
  misc_feature (1)..( 17): Result.005 file - promoters50/1715347
tatcccaaaaattattt

SEQ ID NO: 177706 - DNA, 17 bp, Unknown
  misc_feature (1)..( 17): Result.005 file - promoters50/1715347
ttgattcaaaattctct

SEQ ID NO: 177707 - DNA, 17 bp, Unknown
  misc_feature (1)..( 17): Result.005 file - promoters50/1715347
ttgaatcaatattttat

SEQ ID NO: 177708 - DNA, 17 bp, Unknown
  misc_feature (1)..( 17): Result.005 file - promoters50/1715347
aggatcttaaatgcttt

SEQ ID NO: 177709 - DNA, 17 bp, Unknown
  misc_feature (1)..( 17): Result.005 file - promoters50/1715347
gcttgctctaattgctt

SEQ ID NO: 177710 - DNA, 17 bp, Unknown
  misc_feature (1)..( 17): Result.005 file - promoters50/1715347
attaaaacaaactctta

SEQ ID NO: 177711 - DNA, 11 bp, Unknown
  misc_feature (1)..( 11): Result.005 file - promoters50/1715400
aggttctcaga

SEQ ID NO: 177712 - DNA, 11 bp, Unknown
  misc_feature (1)..( 11): Result.005 file - promoters50/1715400
agggtctgaga

SEQ ID NO: 177713 - DNA, 11 bp, Unknown
  misc_feature (1)..( 11): Result.005 file - promoters50/1715400
tttttctcaaa

SEQ ID NO: 177714 - DNA, 8 bp, Unknown
  misc_feature (1)..( 8): Result.005 file - promoters50/1715478
ttaaaatc

SEQ ID NO: 177715 - DNA, 8 bp, Unknown
  misc_feature (1)..( 8): Result.005 file - promoters50/1715478
tcaaaatc

SEQ ID NO: 177716 - DNA, 8 bp, Unknown
  misc_feature (1)..( 8): Result.005 file - promoters50/1715478
ttataatg

SEQ ID NO: 177717 - DNA, 7 bp, Unknown
  misc_feature (1)..( 7): Result.005 file - promoters50/1715490
agatact

SEQ ID NO: 177718 - DNA, 7 bp, Unknown
  misc_feature (1)..( 7): Result.005 file - promoters50/1715490
agaaact

SEQ ID NO: 177719 - DNA, 7 bp, Unknown
  misc_feature (1)..( 7): Result.005 file - promoters50/1715490
agaaacc

SEQ ID NO: 177720 - DNA, 9 bp, Unknown
  misc_feature (1)..( 9): Result.005 file - promoters50/1715516
ttatttcca

SEQ ID NO: 177721 - DNA, 9 bp, Unknown
  misc_feature (1)..( 9): Result.005 file - promoters50/1715516
gaattacca

SEQ ID NO: 177722 - DNA, 9 bp, Unknown
  misc_feature (1)..( 9): Result.005 file - promoters50/1715516
ttatatcca

SEQ ID NO: 177723 - DNA, 9 bp, Unknown
  misc_feature (1)..( 9): Result.005 file - promoters50/1715516
atatgataa

SEQ ID NO: 177724 - DNA, 13 bp, Unknown
  misc_feature (1)..( 13): Result.005 file - promoters50/1715516
ctcctataaattg

SEQ ID NO: 177725 - DNA, 13 bp, Unknown
  misc_feature (1)..( 13): Result.005 file - promoters50/1715516
ctcttatatattc

SEQ ID NO: 177726 - DNA, 13 bp, Unknown
  misc_feature (1)..( 13): Result.005 file - promoters50/1715516
ttcctatatatca

SEQ ID NO: 177727 - DNA, 13 bp, Unknown
  misc_feature (1)..( 13): Result.005 file - promoters50/1715516
ggtgtataaattg

SEQ ID NO: 177728 - DNA, 10 bp, Unknown
  misc_feature (1)..( 10): Result.005 file - promoters50/1715516
ttaatttaca

SEQ ID NO: 177729 - DNA, 10 bp, Unknown
  misc_feature (1)..( 10): Result.005 file - promoters50/1715516
aaaattgaca

SEQ ID NO: 177730 - DNA, 10 bp, Unknown
  misc_feature (1)..( 10): Result.005 file - promoters50/1715516
taaatttgct

SEQ ID NO: 177731 - DNA, 10 bp, Unknown
  misc_feature (1)..( 10): Result.005 file - promoters50/1715516
taactttttc

SEQ ID NO: 177732 - DNA, 12 bp, Unknown
  misc_feature (1)..( 12): Result.005 file - promoters50/1715516
tgcaatttaata

SEQ ID NO: 177733 - DNA, 12 bp, Unknown
  misc_feature (1)..( 12): Result.005 file - promoters50/1715516
aaaaatataaga

SEQ ID NO: 177734 - DNA, 12 bp, Unknown
  misc_feature (1)..( 12): Result.005 file - promoters50/1715516
aactatttaaaa

SEQ ID NO: 177735 - DNA, 12 bp, Unknown
  misc_feature (1)..( 12): Result.005 file - promoters50/1715516
aagattttcata

SEQ ID NO: 177736 - DNA, 12 bp, Unknown
  misc_feature (1)..( 12): Result.005 file - promoters50/1715516
aaaaaaataaat

SEQ ID NO: 177737 - DNA, 8 bp, Unknown
  misc_feature (1)..( 8): Result.005 file - promoters50/1715516
aacttttt

SEQ ID NO: 177738 - DNA, 8 bp, Unknown
  misc_feature (1)..( 8): Result.005 file - promoters50/1715516
gactcttt

SEQ ID NO: 177739 - DNA, 8 bp, Unknown
  misc_feature (1)..( 8): Result.005 file - promoters50/1715516
aactattt

SEQ ID NO: 177740 - DNA, 8 bp, Unknown
  misc_feature (1)..( 8): Result.005 file - promoters50/1715516
ttctattt

SEQ ID NO: 177741 - DNA, 12 bp, Unknown
  misc_feature (1)..( 12): Result.005 file - promoters50/1715516
cgatagtttaac

SEQ ID NO: 177742 - DNA, 12 bp, Unknown
  misc_feature (1)..( 12): Result.005 file - promoters50/1715516
caatattttaac

SEQ ID NO: 177743 - DNA, 12 bp, Unknown
  misc_feature (1)..( 12): Result.005 file - promoters50/1715516
caaaattgacaa

SEQ ID NO: 177744 - DNA, 12 bp, Unknown
  misc_feature (1)..( 12): Result.005 file - promoters50/1715516
ataaatttgctc

SEQ ID NO: 177745 - DNA, 11 bp, Unknown
  misc_feature (1)..( 11): Result.005 file - promoters50/1715535
tggattttctt

SEQ ID NO: 177746 - DNA, 11 bp, Unknown
  misc_feature (1)..( 11): Result.005 file - promoters50/1715535
caaattttcac

SEQ ID NO: 177747 - DNA, 11 bp, Unknown
  misc_feature (1)..( 11): Result.005 file - promoters50/1715535
cagattttcag

SEQ ID NO: 177748 - DNA, 11 bp, Unknown
  misc_feature (1)..( 11): Result.005 file - promoters50/1715535
caaaatttcac

SEQ ID NO: 177749 - DNA, 11 bp, Unknown
  misc_feature (1)..( 11): Result.005 file - promoters50/1715535
gaaaattatta

SEQ ID NO: 177750 - DNA, 11 bp, Unknown
  misc_feature (1)..( 11): Result.005 file - promoters50/1715535
tgaaatttccg

SEQ ID NO: 177751 - DNA, 11 bp, Unknown
  misc_feature (1)..( 11): Result.005 file - promoters50/1715535
cgtcatttcaa

SEQ ID NO: 177752 - DNA, 11 bp, Unknown
  misc_feature (1)..( 11): Result.005 file - promoters50/1715535
caaaatttcac

SEQ ID NO: 177753 - DNA, 11 bp, Unknown
  misc_feature (1)..( 11): Result.005 file - promoters50/1715535
caaattttcac

SEQ ID NO: 177754 - DNA, 12 bp, Unknown
  misc_feature (1)..( 12): Result.005 file - promoters50/1715535
aaaaatattcgg

SEQ ID NO: 177755 - DNA, 12 bp, Unknown
  misc_feature (1)..( 12): Result.005 file - promoters50/1715535
tgaaatttccgg

SEQ ID NO: 177756 - DNA, 12 bp, Unknown
  misc_feature (1)..( 12): Result.005 file - promoters50/1715535
taaactatttat

SEQ ID NO: 177757 - DNA, 12 bp, Unknown
  misc_feature (1)..( 12): Result.005 file - promoters50/1715535
ttttgattttgc

SEQ ID NO: 177758 - DNA, 12 bp, Unknown
  misc_feature (1)..( 12): Result.005 file - promoters50/1715535
atatgatttatt

SEQ ID NO: 177759 - DNA, 12 bp, Unknown
  misc_feature (1)..( 12): Result.005 file - promoters50/1715535
atgtgattttgt

SEQ ID NO: 177760 - DNA, 12 bp, Unknown
  misc_feature (1)..( 12): Result.005 file - promoters50/1715535
atataatttaaa

SEQ ID NO: 177761 - DNA, 12 bp, Unknown
  misc_feature (1)..( 12): Result.005 file - promoters50/1715535
ttacaatttaca

SEQ ID NO: 177762 - DNA, 12 bp, Unknown
  misc_feature (1)..( 12): Result.005 file - promoters50/1715535
gtttgatatatt

SEQ ID NO: 177763 - DNA, 12 bp, Unknown
  misc_feature (1)..( 12): Result.005 file - promoters50/1715595
aaatcaaacata

SEQ ID NO: 177764 - DNA, 12 bp, Unknown
  misc_feature (1)..( 12): Result.005 file - promoters50/1715595
gagacaaacaaa

SEQ ID NO: 177765 - DNA, 12 bp, Unknown
  misc_feature (1)..( 12): Result.005 file - promoters50/1715595
taattaaacttt

SEQ ID NO: 177766 - DNA, 12 bp, Unknown
  misc_feature (1)..( 12): Result.005 file - promoters50/1715595
aggaaaaatata

SEQ ID NO: 177767 - DNA, 12 bp, Unknown
  misc_feature (1)..( 12): Result.005 file - promoters50/1715595
taattaagcata

SEQ ID NO: 177768 - DNA, 12 bp, Unknown
  misc_feature (1)..( 12): Result.005 file - promoters50/1715595
agattcagcctt

SEQ ID NO: 177769 - DNA, 8 bp, Unknown
  misc_feature (1)..( 8): Result.005 file - promoters50/1715615
taaagaca

SEQ ID NO: 177770 - DNA, 8 bp, Unknown
  misc_feature (1)..( 8): Result.005 file - promoters50/1715615
taaagata

SEQ ID NO: 177771 - DNA, 8 bp, Unknown
  misc_feature (1)..( 8): Result.005 file - promoters50/1715615
gaaaaaca

SEQ ID NO: 177772 - DNA, 8 bp, Unknown
  misc_feature (1)..( 8): Result.005 file - promoters50/1715615
caaaaata

SEQ ID NO: 177773 - DNA, 11 bp, Unknown
  misc_feature (1)..( 11): Result.005 file - promoters50/1715810
acaattaaatt

SEQ ID NO: 177774 - DNA, 11 bp, Unknown
  misc_feature (1)..( 11): Result.005 file - promoters50/1715810
gaaatgaaata

SEQ ID NO: 177775 - DNA, 12 bp, Unknown
  misc_feature (1)..( 12): Result.005 file - promoters50/1715810
ttaatttaaaga

SEQ ID NO: 177776 - DNA, 12 bp, Unknown
  misc_feature (1)..( 12): Result.005 file - promoters50/1715810
ggaaaagaaaat

SEQ ID NO: 177777 - DNA, 12 bp, Unknown
  misc_feature (1)..( 12): Result.005 file - promoters50/1715810
ggattttcaatt

SEQ ID NO: 177778 - DNA, 9 bp, Unknown
  misc_feature (1)..( 9): Result.005 file - promoters50/1715994
aataaacaa

SEQ ID NO: 177779 - DNA, 9 bp, Unknown
  misc_feature (1)..( 9): Result.005 file - promoters50/1715994
tatatacac

SEQ ID NO: 177780 - DNA, 9 bp, Unknown
  misc_feature (1)..( 9): Result.005 file - promoters50/1715994
tgtaaacac

SEQ ID NO: 177781 - DNA, 9 bp, Unknown
  misc_feature (1)..( 9): Result.005 file - promoters50/1715994
aataaacaa

SEQ ID NO: 177782 - DNA, 9 bp, Unknown
  misc_feature (1)..( 9): Result.005 file - promoters50/1715994
acaaaacaa

SEQ ID NO: 177783 - DNA, 9 bp, Unknown
  misc_feature (1)..( 9): Result.005 file - promoters50/1715994
gagaaaaaa

SEQ ID NO: 177784 - DNA, 11 bp, Unknown
  misc_feature (1)..( 11): Result.005 file - promoters50/1716037
atatttttatt

SEQ ID NO: 177785 - DNA, 11 bp, Unknown
  misc_feature (1)..( 11): Result.005 file - promoters50/1716037
atattttattt

SEQ ID NO: 177786 - DNA, 11 bp, Unknown
  misc_feature (1)..( 11): Result.005 file - promoters50/1716037
atatattagcc

SEQ ID NO: 177787 - DNA, 11 bp, Unknown
  misc_feature (1)..( 11): Result.005 file - promoters50/1716037
ataaattgtta

SEQ ID NO: 177788 - DNA, 11 bp, Unknown
  misc_feature (1)..( 11): Result.005 file - promoters50/1716037
atgtttctttg

SEQ ID NO: 177789 - DNA, 11 bp, Unknown
  misc_feature (1)..( 11): Result.005 file - promoters50/1716037
ttaaaaaaata

SEQ ID NO: 177790 - DNA, 15 bp, Unknown
  misc_feature (1)..( 15): Result.005 file - promoters50/1716037
tatatttttattctt

SEQ ID NO: 177791 - DNA, 15 bp, Unknown
  misc_feature (1)..( 15): Result.005 file - promoters50/1716037
tcatattttatttgt

SEQ ID NO: 177792 - DNA, 16 bp, Unknown
  misc_feature (1)..( 16): Result.005 file - promoters50/1716037
ataaattgttactttt

SEQ ID NO: 177793 - DNA, 16 bp, Unknown
  misc_feature (1)..( 16): Result.005 file - promoters50/1716037
aggaatgtttctttgc

SEQ ID NO: 177794 - DNA, 16 bp, Unknown
  misc_feature (1)..( 16): Result.005 file - promoters50/1716037
tgggcgttttcttaat

SEQ ID NO: 177795 - DNA, 16 bp, Unknown
  misc_feature (1)..( 16): Result.005 file - promoters50/1716037
gccattctttaaaaaa

SEQ ID NO: 177796 - DNA, 15 bp, Unknown
  misc_feature (1)..( 15): Result.005 file - promoters50/1716037
tattcttttgttttt

SEQ ID NO: 177797 - DNA, 15 bp, Unknown
  misc_feature (1)..( 15): Result.005 file - promoters50/1716037
attttatttgtttct

SEQ ID NO: 177798 - DNA, 15 bp, Unknown
  misc_feature (1)..( 15): Result.005 file - promoters50/1716037
ggaatgtttctttgc

SEQ ID NO: 177799 - DNA, 15 bp, Unknown
  misc_feature (1)..( 15): Result.005 file - promoters50/1716037
ttttaattttttttt

SEQ ID NO: 177800 - DNA, 15 bp, Unknown
  misc_feature (1)..( 15): Result.005 file - promoters50/1716037
gggcgttttcttaat

SEQ ID NO: 177801 - DNA, 15 bp, Unknown
  misc_feature (1)..( 15): Result.005 file - promoters50/1716037
aaaatatttaaataa

SEQ ID NO: 177802 - DNA, 15 bp, Unknown
  misc_feature (1)..( 15): Result.005 file - promoters50/1716037
aaaaaattgaaactt

SEQ ID NO: 177803 - DNA, 9 bp, Unknown
  misc_feature (1)..( 9): Result.005 file - promoters50/1716037
tttttgaat

SEQ ID NO: 177804 - DNA, 9 bp, Unknown
  misc_feature (1)..( 9): Result.005 file - promoters50/1716037
tttctgatc

SEQ ID NO: 177805 - DNA, 9 bp, Unknown
  misc_feature (1)..( 9): Result.005 file - promoters50/1716037
gtttagaat

SEQ ID NO: 177806 - DNA, 9 bp, Unknown
  misc_feature (1)..( 9): Result.005 file - promoters50/1716037
ttttttttt

SEQ ID NO: 177807 - DNA, 9 bp, Unknown
  misc_feature (1)..( 9): Result.005 file - promoters50/1716037
tcttagaaa

SEQ ID NO: 177808 - DNA, 9 bp, Unknown
  misc_feature (1)..( 9): Result.005 file - promoters50/1716037
attctgaat

SEQ ID NO: 177809 - DNA, 17 bp, Unknown
  misc_feature (1)..( 17): Result.005 file - promoters50/1716037
atttttattcttttgtt

SEQ ID NO: 177810 - DNA, 17 bp, Unknown
  misc_feature (1)..( 17): Result.005 file - promoters50/1716037
ggaatgtttctttgctc

SEQ ID NO: 177811 - DNA, 17 bp, Unknown
  misc_feature (1)..( 17): Result.005 file - promoters50/1716037
attttaattttttttta

SEQ ID NO: 177812 - DNA, 17 bp, Unknown
  misc_feature (1)..( 17): Result.005 file - promoters50/1716037
ttcatattttatttgtt

SEQ ID NO: 177813 - DNA, 17 bp, Unknown
  misc_feature (1)..( 17): Result.005 file - promoters50/1716037
tgggcgttttcttaatt

SEQ ID NO: 177814 - DNA, 17 bp, Unknown
  misc_feature (1)..( 17): Result.005 file - promoters50/1716037
aataaaatatttaaata

SEQ ID NO: 177815 - DNA, 17 bp, Unknown
  misc_feature (1)..( 17): Result.005 file - promoters50/1716037
gaacaaaaaaattgaaa

SEQ ID NO: 177816 - DNA, 16 bp, Unknown
  misc_feature (1)..( 16): Result.005 file - promoters50/1716037
atttatcaatcacata

SEQ ID NO: 177817 - DNA, 16 bp, Unknown
  misc_feature (1)..( 16): Result.005 file - promoters50/1716037
atttattaattatttt

SEQ ID NO: 177818 - DNA, 16 bp, Unknown
  misc_feature (1)..( 16): Result.005 file - promoters50/1716037
gcgtatcaaccaatgt

SEQ ID NO: 177819 - DNA, 16 bp, Unknown
  misc_feature (1)..( 16): Result.005 file - promoters50/1716037
taattttaattttttt

SEQ ID NO: 177820 - DNA, 16 bp, Unknown
  misc_feature (1)..( 16): Result.005 file - promoters50/1716037
aaaataaaatatttaa

SEQ ID NO: 177821 - DNA, 16 bp, Unknown
  misc_feature (1)..( 16): Result.005 file - promoters50/1716037
acaaaaaaattgaaac

SEQ ID NO: 177822 - DNA, 10 bp, Unknown
  misc_feature (1)..( 10): Result.005 file - promoters50/1716037
aaaaatgttc

SEQ ID NO: 177823 - DNA, 10 bp, Unknown
  misc_feature (1)..( 10): Result.005 file - promoters50/1716037
caaaattttc

SEQ ID NO: 177824 - DNA, 10 bp, Unknown
  misc_feature (1)..( 10): Result.005 file - promoters50/1716037
caaaagtttt

SEQ ID NO: 177825 - DNA, 10 bp, Unknown
  misc_feature (1)..( 10): Result.005 file - promoters50/1716037
aaaaatcaat

SEQ ID NO: 177826 - DNA, 10 bp, Unknown
  misc_feature (1)..( 10): Result.005 file - promoters50/1716037
tcatattttc

SEQ ID NO: 177827 - DNA, 10 bp, Unknown
  misc_feature (1)..( 10): Result.005 file - promoters50/1716037
gaaactttag

SEQ ID NO: 177828 - DNA, 12 bp, Unknown
  misc_feature (1)..( 12): Result.005 file - promoters50/1716040
agacattgttgg

SEQ ID NO: 177829 - DNA, 12 bp, Unknown
  misc_feature (1)..( 12): Result.005 file - promoters50/1716040
atttattgtttg

SEQ ID NO: 177830 - DNA, 12 bp, Unknown
  misc_feature (1)..( 12): Result.005 file - promoters50/1716040
gtttaatgttat

SEQ ID NO: 177831 - DNA, 12 bp, Unknown
  misc_feature (1)..( 12): Result.005 file - promoters50/1716040
accaaatcttaa

SEQ ID NO: 177832 - DNA, 12 bp, Unknown
  misc_feature (1)..( 12): Result.005 file - promoters50/1716040
accaaatattat

SEQ ID NO: 177833 - DNA, 12 bp, Unknown
  misc_feature (1)..( 12): Result.005 file - promoters50/1716040
gttaaatgtata

SEQ ID NO: 177834 - DNA, 11 bp, Unknown
  misc_feature (1)..( 11): Result.005 file - promoters50/1806991
ttaacaaaaaa

SEQ ID NO: 177835 - DNA, 11 bp, Unknown
  misc_feature (1)..( 11): Result.005 file - promoters50/1806991
ggaactaaaaa

SEQ ID NO: 177836 - DNA, 11 bp, Unknown
  misc_feature (1)..( 11): Result.005 file - promoters50/1806991
ttaccaaaaat

SEQ ID NO: 177837 - DNA, 9 bp, Unknown
  misc_feature (1)..( 9): Result.005 file - promoters50/1806991
catatgttt

SEQ ID NO: 177838 - DNA, 9 bp, Unknown
  misc_feature (1)..( 9): Result.005 file - promoters50/1806991
catttgtat

SEQ ID NO: 177839 - DNA, 9 bp, Unknown
  misc_feature (1)..( 9): Result.005 file - promoters50/1806991
aatttctat

SEQ ID NO: 177840 - DNA, 12 bp, Unknown
  misc_feature (1)..( 12): Result.005 file - promoters50/1806998
ataacaaagttt

SEQ ID NO: 177841 - DNA, 12 bp, Unknown
  misc_feature (1)..( 12): Result.005 file - promoters50/1806998
aacacaaagtca

SEQ ID NO: 177842 - DNA, 12 bp, Unknown
  misc_feature (1)..( 12): Result.005 file - promoters50/1806998
aaatgaaaattt

SEQ ID NO: 177843 - DNA, 12 bp, Unknown
  misc_feature (1)..( 12): Result.005 file - promoters50/1806998
aaaacaaaaatt

SEQ ID NO: 177844 - DNA, 12 bp, Unknown
  misc_feature (1)..( 12): Result.005 file - promoters50/1806998
aactcaaaaagt

SEQ ID NO: 177845 - DNA, 12 bp, Unknown
  misc_feature (1)..( 12): Result.005 file - promoters50/1806998
agaacattggaa

SEQ ID NO: 177846 - DNA, 10 bp, Unknown
  misc_feature (1)..( 10): Result.005 file - promoters50/1807014
aatattttcc

SEQ ID NO: 177847 - DNA, 10 bp, Unknown
  misc_feature (1)..( 10): Result.005 file - promoters50/1807014
ttctttttcc

SEQ ID NO: 177848 - DNA, 10 bp, Unknown
  misc_feature (1)..( 10): Result.005 file - promoters50/1807014
aattttttct

SEQ ID NO: 177849 - DNA, 10 bp, Unknown
  misc_feature (1)..( 10): Result.005 file - promoters50/1807014
ctaaaataaa

SEQ ID NO: 177850 - DNA, 10 bp, Unknown
  misc_feature (1)..( 10): Result.005 file - promoters50/1807014
ttaaaagaaa

SEQ ID NO: 177851 - DNA, 10 bp, Unknown
  misc_feature (1)..( 10): Result.005 file - promoters50/1807014
ttaaaagaat

SEQ ID NO: 177852 - DNA, 13 bp, Unknown
  misc_feature (1)..( 13): Result.005 file - promoters50/1807067
gataaaacaagtt

SEQ ID NO: 177853 - DNA, 13 bp, Unknown
  misc_feature (1)..( 13): Result.005 file - promoters50/1807067
attaaaacacaca

SEQ ID NO: 177854 - DNA, 13 bp, Unknown
  misc_feature (1)..( 13): Result.005 file - promoters50/1807067
tttaaaacatgtt

SEQ ID NO: 177855 - DNA, 13 bp, Unknown
  misc_feature (1)..( 13): Result.005 file - promoters50/1807067
ttcaaaacacggc

SEQ ID NO: 177856 - DNA, 13 bp, Unknown
  misc_feature (1)..( 13): Result.005 file - promoters50/1807067
tttacaactgagc

SEQ ID NO: 177857 - DNA, 13 bp, Unknown
  misc_feature (1)..( 13): Result.005 file - promoters50/1807067
ttcataactataa

SEQ ID NO: 177858 - DNA, 15 bp, Unknown
  misc_feature (1)..( 15): Result.005 file - promoters50/1807067
gtgtaatatttattg

SEQ ID NO: 177859 - DNA, 15 bp, Unknown
  misc_feature (1)..( 15): Result.005 file - promoters50/1807067
atgtattatgtgagc

SEQ ID NO: 177860 - DNA, 15 bp, Unknown
  misc_feature (1)..( 15): Result.005 file - promoters50/1807067
atgtattattgtgta

SEQ ID NO: 177861 - DNA, 15 bp, Unknown
  misc_feature (1)..( 15): Result.005 file - promoters50/1807067
atgaattagcttgct

SEQ ID NO: 177862 - DNA, 15 bp, Unknown
  misc_feature (1)..( 15): Result.005 file - promoters50/1807067
tcgtatcatttgtat

SEQ ID NO: 177863 - DNA, 15 bp, Unknown
  misc_feature (1)..( 15): Result.005 file - promoters50/1807067
attcatcctttttat

SEQ ID NO: 177864 - DNA, 19 bp, Unknown
  misc_feature (1)..( 19): Result.005 file - promoters50/1807067
acaactaattttattataa

SEQ ID NO: 177865 - DNA, 19 bp, Unknown
  misc_feature (1)..( 19): Result.005 file - promoters50/1807067
tcaacttatttgcttcata

SEQ ID NO: 177866 - DNA, 19 bp, Unknown
  misc_feature (1)..( 19): Result.005 file - promoters50/1807067
ataacttattgtataataa

SEQ ID NO: 177867 - DNA, 19 bp, Unknown
  misc_feature (1)..( 19): Result.005 file - promoters50/1807067
gcaacaaatcaaagggaaa

SEQ ID NO: 177868 - DNA, 19 bp, Unknown
  misc_feature (1)..( 19): Result.005 file - promoters50/1807067
acaattaaaaaaaaagtta

SEQ ID NO: 177869 - DNA, 19 bp, Unknown
  misc_feature (1)..( 19): Result.005 file - promoters50/1807067
tcaacaaccaaagcctaga

SEQ ID NO: 177870 - DNA, 14 bp, Unknown
  misc_feature (1)..( 14): Result.005 file - promoters50/1807067
atcaattttaagta

SEQ ID NO: 177871 - DNA, 14 bp, Unknown
  misc_feature (1)..( 14): Result.005 file - promoters50/1807067
atcaagtttctata

SEQ ID NO: 177872 - DNA, 14 bp, Unknown
  misc_feature (1)..( 14): Result.005 file - promoters50/1807067
tcggatttttagta

SEQ ID NO: 177873 - DNA, 14 bp, Unknown
  misc_feature (1)..( 14): Result.005 file - promoters50/1807067
gatgattttaatta

SEQ ID NO: 177874 - DNA, 14 bp, Unknown
  misc_feature (1)..( 14): Result.005 file - promoters50/1807067
acatatttttcttc

SEQ ID NO: 177875 - DNA, 14 bp, Unknown
  misc_feature (1)..( 14): Result.005 file - promoters50/1807067
ggtgatttgaatta

SEQ ID NO: 177876 - DNA, 14 bp, Unknown
  misc_feature (1)..( 14): Result.005 file - promoters50/1807067
gatggtttttgtag

SEQ ID NO: 177877 - DNA, 13 bp, Unknown
  misc_feature (1)..( 13): Result.005 file - promoters50/1807067
catgttagtgtaa

SEQ ID NO: 177878 - DNA, 13 bp, Unknown
  misc_feature (1)..( 13): Result.005 file - promoters50/1807067
tgtattattgtgt

SEQ ID NO: 177879 - DNA, 13 bp, Unknown
  misc_feature (1)..( 13): Result.005 file - promoters50/1807067
acatgtattatgt

SEQ ID NO: 177880 - DNA, 13 bp, Unknown
  misc_feature (1)..( 13): Result.005 file - promoters50/1807067
tatcgtatcattt

SEQ ID NO: 177881 - DNA, 13 bp, Unknown
  misc_feature (1)..( 13): Result.005 file - promoters50/1807067
atcctttttatca

SEQ ID NO: 177882 - DNA, 13 bp, Unknown
  misc_feature (1)..( 13): Result.005 file - promoters50/1807067
gctgccatcgttt

SEQ ID NO: 177883 - DNA, 9 bp, Unknown
  misc_feature (1)..( 9): Result.005 file - promoters50/1807244
cgtccgaat

SEQ ID NO: 177884 - DNA, 9 bp, Unknown
  misc_feature (1)..( 9): Result.005 file - promoters50/1807244
tgtcctaat

SEQ ID NO: 177885 - DNA, 9 bp, Unknown
  misc_feature (1)..( 9): Result.005 file - promoters50/1807244
tgtcttaac

SEQ ID NO: 177886 - DNA, 8 bp, Unknown
  misc_feature (1)..( 8): Result.005 file - promoters50/1807415
gtttgtcc

SEQ ID NO: 177887 - DNA, 8 bp, Unknown
  misc_feature (1)..( 8): Result.005 file - promoters50/1807415
ctttgtct

SEQ ID NO: 177888 - DNA, 8 bp, Unknown
  misc_feature (1)..( 8): Result.005 file - promoters50/1807415
ctttttct

SEQ ID NO: 177889 - DNA, 6 bp, Unknown
  misc_feature (1)..( 6): Result.005 file - promoters50/1807415
attttt

SEQ ID NO: 177890 - DNA, 6 bp, Unknown
  misc_feature (1)..( 6): Result.005 file - promoters50/1807415
attttt

SEQ ID NO: 177891 - DNA, 7 bp, Unknown
  misc_feature (1)..( 7): Result.005 file - promoters50/1807415
attcttt

SEQ ID NO: 177892 - DNA, 8 bp, Unknown
  misc_feature (1)..( 8): Result.005 file - promoters50/1807415
tttctctc

SEQ ID NO: 177893 - DNA, 8 bp, Unknown
  misc_feature (1)..( 8): Result.005 file - promoters50/1807415
tttctctc

SEQ ID NO: 177894 - DNA, 8 bp, Unknown
  misc_feature (1)..( 8): Result.005 file - promoters50/1807415
attctctg

SEQ ID NO: 177895 - DNA, 7 bp, Unknown
  misc_feature (1)..( 7): Result.005 file - promoters50/1807415
caaataa

SEQ ID NO: 177896 - DNA, 7 bp, Unknown
  misc_feature (1)..( 7): Result.005 file - promoters50/1807415
caaataa

SEQ ID NO: 177897 - DNA, 7 bp, Unknown
  misc_feature (1)..( 7): Result.005 file - promoters50/1807415
taaataa

SEQ ID NO: 177898 - DNA, 7 bp, Unknown
  misc_feature (1)..( 7): Result.005 file - promoters50/1807415
ttcttta

SEQ ID NO: 177899 - DNA, 7 bp, Unknown
  misc_feature (1)..( 7): Result.005 file - promoters50/1807415
atcttta

SEQ ID NO: 177900 - DNA, 7 bp, Unknown
  misc_feature (1)..( 7): Result.005 file - promoters50/1807415
atttttt

SEQ ID NO: 177901 - DNA, 11 bp, Unknown
  misc_feature (1)..( 11): Result.005 file - promoters50/1807554
aatatattttt

SEQ ID NO: 177902 - DNA, 11 bp, Unknown
  misc_feature (1)..( 11): Result.005 file - promoters50/1807554
aatatgttttt

SEQ ID NO: 177903 - DNA, 11 bp, Unknown
  misc_feature (1)..( 11): Result.005 file - promoters50/1807554
aatgagttttt

SEQ ID NO: 177904 - DNA, 7 bp, Unknown
  misc_feature (1)..( 7): Result.005 file - promoters50/1807554
tttcacc

SEQ ID NO: 177905 - DNA, 7 bp, Unknown
  misc_feature (1)..( 7): Result.005 file - promoters50/1807554
tttgacc

SEQ ID NO: 177906 - DNA, 7 bp, Unknown
  misc_feature (1)..( 7): Result.005 file - promoters50/1807554
tttcacc

SEQ ID NO: 177907 - DNA, 6 bp, Unknown
  misc_feature (1)..( 6): Result.005 file - promoters50/1807554
taaaac

SEQ ID NO: 177908 - DNA, 6 bp, Unknown
  misc_feature (1)..( 6): Result.005 file - promoters50/1807554
taaaac

SEQ ID NO: 177909 - DNA, 6 bp, Unknown
  misc_feature (1)..( 6): Result.005 file - promoters50/1807554
taaaac

SEQ ID NO: 177910 - DNA, 10 bp, Unknown
  misc_feature (1)..( 10): Result.005 file - promoters50/1807554
tccatcccta

SEQ ID NO: 177911 - DNA, 10 bp, Unknown
  misc_feature (1)..( 10): Result.005 file - promoters50/1807554
gtcatctcta

SEQ ID NO: 177912 - DNA, 10 bp, Unknown
  misc_feature (1)..( 10): Result.005 file - promoters50/1807554
tccttccgtg

SEQ ID NO: 177913 - DNA, 11 bp, Unknown
  misc_feature (1)..( 11): Result.005 file - promoters50/1807736
ctatgaataat

SEQ ID NO: 177914 - DNA, 11 bp, Unknown
  misc_feature (1)..( 11): Result.005 file - promoters50/1807736
gtataaatatc

SEQ ID NO: 177915 - DNA, 11 bp, Unknown
  misc_feature (1)..( 11): Result.005 file - promoters50/1807736
acctgaatact

SEQ ID NO: 177916 - DNA, 11 bp, Unknown
  misc_feature (1)..( 11): Result.005 file - promoters50/1807736
gtagaaagtca

SEQ ID NO: 177917 - DNA, 11 bp, Unknown
  misc_feature (1)..( 11): Result.005 file - promoters50/1807736
atctgaacact

SEQ ID NO: 177918 - DNA, 11 bp, Unknown
  misc_feature (1)..( 11): Result.005 file - promoters50/1807736
cattgaacatt

SEQ ID NO: 177919 - DNA, 8 bp, Unknown
  misc_feature (1)..( 8): Result.005 file - promoters50/1807740
aaacttaa

SEQ ID NO: 177920 - DNA, 8 bp, Unknown
  misc_feature (1)..( 8): Result.005 file - promoters50/1807740
aaacttaa

SEQ ID NO: 177921 - DNA, 8 bp, Unknown
  misc_feature (1)..( 8): Result.005 file - promoters50/1807740
aaaattat

SEQ ID NO: 177922 - DNA, 8 bp, Unknown
  misc_feature (1)..( 8): Result.005 file - promoters50/1807771
aaaaacag

SEQ ID NO: 177923 - DNA, 8 bp, Unknown
  misc_feature (1)..( 8): Result.005 file - promoters50/1807771
aaatacac

SEQ ID NO: 177924 - DNA, 8 bp, Unknown
  misc_feature (1)..( 8): Result.005 file - promoters50/1807771
aaaaacaa

SEQ ID NO: 177925 - DNA, 8 bp, Unknown
  misc_feature (1)..( 8): Result.005 file - promoters50/1807771
tgaaacag

SEQ ID NO: 177926 - DNA, 8 bp, Unknown
  misc_feature (1)..( 8): Result.005 file - promoters50/1807771
taaaacac

SEQ ID NO: 177927 - DNA, 8 bp, Unknown
  misc_feature (1)..( 8): Result.005 file - promoters50/1807771
aaatatat

SEQ ID NO: 177928 - DNA, 10 bp, Unknown
  misc_feature (1)..( 10): Result.005 file - promoters50/1807771
agaaagtatt

SEQ ID NO: 177929 - DNA, 10 bp, Unknown
  misc_feature (1)..( 10): Result.005 file - promoters50/1807771
ccaaaatatt

SEQ ID NO: 177930 - DNA, 10 bp, Unknown
  misc_feature (1)..( 10): Result.005 file - promoters50/1807771
ttaaaatata

SEQ ID NO: 177931 - DNA, 10 bp, Unknown
  misc_feature (1)..( 10): Result.005 file - promoters50/1807771
acaaaatctc

SEQ ID NO: 177932 - DNA, 10 bp, Unknown
  misc_feature (1)..( 10): Result.005 file - promoters50/1807771
acaaaaacaa

SEQ ID NO: 177933 - DNA, 10 bp, Unknown
  misc_feature (1)..( 10): Result.005 file - promoters50/1807771
agaaaataga

SEQ ID NO: 177934 - DNA, 10 bp, Unknown
  misc_feature (1)..( 10): Result.005 file - promoters50/1807771
ataaaataga

SEQ ID NO: 177935 - DNA, 10 bp, Unknown
  misc_feature (1)..( 10): Result.005 file - promoters50/1807774
taaaaagctc

SEQ ID NO: 177936 - DNA, 10 bp, Unknown
  misc_feature (1)..( 10): Result.005 file - promoters50/1807774
taaaaatttt

SEQ ID NO: 177937 - DNA, 10 bp, Unknown
  misc_feature (1)..( 10): Result.005 file - promoters50/1807774
taaaaaatat

SEQ ID NO: 177938 - DNA, 10 bp, Unknown
  misc_feature (1)..( 10): Result.005 file - promoters50/1807774
taacaatttt

SEQ ID NO: 177939 - DNA, 10 bp, Unknown
  misc_feature (1)..( 10): Result.005 file - promoters50/1807774
ttttggaaat

SEQ ID NO: 177940 - DNA, 10 bp, Unknown
  misc_feature (1)..( 10): Result.005 file - promoters50/1807774
ccaaggaaat

SEQ ID NO: 177941 - DNA, 10 bp, Unknown
  misc_feature (1)..( 10): Result.005 file - promoters50/1807774
ttttcgaaag

SEQ ID NO: 177942 - DNA, 7 bp, Unknown
  misc_feature (1)..( 7): Result.005 file - promoters50/1807774
aaagttt

SEQ ID NO: 177943 - DNA, 7 bp, Unknown
  misc_feature (1)..( 7): Result.005 file - promoters50/1807774
aaatttt

SEQ ID NO: 177944 - DNA, 7 bp, Unknown
  misc_feature (1)..( 7): Result.005 file - promoters50/1807774
aaattta

SEQ ID NO: 177945 - DNA, 8 bp, Unknown
  misc_feature (1)..( 8): Result.005 file - promoters50/1807774
atatcaac

SEQ ID NO: 177946 - DNA, 8 bp, Unknown
  misc_feature (1)..( 8): Result.005 file - promoters50/1807774
ataccaac

SEQ ID NO: 177947 - DNA, 8 bp, Unknown
  misc_feature (1)..( 8): Result.005 file - promoters50/1807774
ttacaaac

SEQ ID NO: 177948 - DNA, 8 bp, Unknown
  misc_feature (1)..( 8): Result.005 file - promoters50/1807774
cactgttc

SEQ ID NO: 177949 - DNA, 8 bp, Unknown
  misc_feature (1)..( 8): Result.005 file - promoters50/1807774
cactgttt

SEQ ID NO: 177950 - DNA, 8 bp, Unknown
  misc_feature (1)..( 8): Result.005 file - promoters50/1807774
tactattt

SEQ ID NO: 177951 - DNA, 8 bp, Unknown
  misc_feature (1)..( 8): Result.005 file - promoters50/1807774
tataaaac

SEQ ID NO: 177952 - DNA, 8 bp, Unknown
  misc_feature (1)..( 8): Result.005 file - promoters50/1807774
tataaata

SEQ ID NO: 177953 - DNA, 8 bp, Unknown
  misc_feature (1)..( 8): Result.005 file - promoters50/1807774
tatatata

SEQ ID NO: 177954 - DNA, 8 bp, Unknown
  misc_feature (1)..( 8): Result.005 file - promoters50/1807774
attaattg

SEQ ID NO: 177955 - DNA, 8 bp, Unknown
  misc_feature (1)..( 8): Result.005 file - promoters50/1807774
atttattt

SEQ ID NO: 177956 - DNA, 8 bp, Unknown
  misc_feature (1)..( 8): Result.005 file - promoters50/1807774
atttgttt

SEQ ID NO: 177957 - DNA, 7 bp, Unknown
  misc_feature (1)..( 7): Result.005 file - promoters50/1808030
ggtccaa

SEQ ID NO: 177958 - DNA, 7 bp, Unknown
  misc_feature (1)..( 7): Result.005 file - promoters50/1808030
ggtccat

SEQ ID NO: 177959 - DNA, 7 bp, Unknown
  misc_feature (1)..( 7): Result.005 file - promoters50/1808030
tgtccat

SEQ ID NO: 177960 - DNA, 8 bp, Unknown
  misc_feature (1)..( 8): Result.005 file - promoters50/1808030
atacaaat

SEQ ID NO: 177961 - DNA, 8 bp, Unknown
  misc_feature (1)..( 8): Result.005 file - promoters50/1808030
atacaaaa

SEQ ID NO: 177962 - DNA, 8 bp, Unknown
  misc_feature (1)..( 8): Result.005 file - promoters50/1808030
caacaaat

SEQ ID NO: 177963 - DNA, 7 bp, Unknown
  misc_feature (1)..( 7): Result.005 file - promoters50/1808030
caaaaac

SEQ ID NO: 177964 - DNA, 7 bp, Unknown
  misc_feature (1)..( 7): Result.005 file - promoters50/1808030
caataac

SEQ ID NO: 177965 - DNA, 7 bp, Unknown
  misc_feature (1)..( 7): Result.005 file - promoters50/1808030
caaaaaa

SEQ ID NO: 177966 - DNA, 12 bp, Unknown
  misc_feature (1)..( 12): Result.005 file - promoters50/1808072
tccataattatt

SEQ ID NO: 177967 - DNA, 12 bp, Unknown
  misc_feature (1)..( 12): Result.005 file - promoters50/1808072
taaataattaaa

SEQ ID NO: 177968 - DNA, 12 bp, Unknown
  misc_feature (1)..( 12): Result.005 file - promoters50/1808072
aatataattgac

SEQ ID NO: 177969 - DNA, 12 bp, Unknown
  misc_feature (1)..( 12): Result.005 file - promoters50/1808072
taaacaatggtt

SEQ ID NO: 177970 - DNA, 12 bp, Unknown
  misc_feature (1)..( 12): Result.005 file - promoters50/1808072
atcataagtaat

SEQ ID NO: 177971 - DNA, 12 bp, Unknown
  misc_feature (1)..( 12): Result.005 file - promoters50/1808072
caaacgatggtc

SEQ ID NO: 177972 - DNA, 8 bp, Unknown
  misc_feature (1)..( 8): Result.005 file - promoters50/1808072
taatttaa

SEQ ID NO: 177973 - DNA, 8 bp, Unknown
  misc_feature (1)..( 8): Result.005 file - promoters50/1808072
aaatataa

SEQ ID NO: 177974 - DNA, 8 bp, Unknown
  misc_feature (1)..( 8): Result.005 file - promoters50/1808072
taattttt

SEQ ID NO: 177975 - DNA, 8 bp, Unknown
  misc_feature (1)..( 8): Result.005 file - promoters50/1808072
aaatataa

SEQ ID NO: 177976 - DNA, 8 bp, Unknown
  misc_feature (1)..( 8): Result.005 file - promoters50/1808072
taatttaa

SEQ ID NO: 177977 - DNA, 8 bp, Unknown
  misc_feature (1)..( 8): Result.005 file - promoters50/1808072
ttatataa

SEQ ID NO: 177978 - DNA, 13 bp, Unknown
  misc_feature (1)..( 13): Result.005 file - promoters50/1808072
tgacaaaatttaa

SEQ ID NO: 177979 - DNA, 13 bp, Unknown
  misc_feature (1)..( 13): Result.005 file - promoters50/1808072
ctacaaaataaac

SEQ ID NO: 177980 - DNA, 13 bp, Unknown
  misc_feature (1)..( 13): Result.005 file - promoters50/1808072
attgaaaatttta

SEQ ID NO: 177981 - DNA, 13 bp, Unknown
  misc_feature (1)..( 13): Result.005 file - promoters50/1808072
tgactaaagatta

SEQ ID NO: 177982 - DNA, 13 bp, Unknown
  misc_feature (1)..( 13): Result.005 file - promoters50/1808072
aaaggaaattaaa

SEQ ID NO: 177983 - DNA, 13 bp, Unknown
  misc_feature (1)..( 13): Result.005 file - promoters50/1808072
attataaattagg

SEQ ID NO: 177984 - DNA, 15 bp, Unknown
  misc_feature (1)..( 15): Result.005 file - promoters50/1808072
aaaatttaaaattgt

SEQ ID NO: 177985 - DNA, 15 bp, Unknown
  misc_feature (1)..( 15): Result.005 file - promoters50/1808072
taaatttaaaaacca

SEQ ID NO: 177986 - DNA, 15 bp, Unknown
  misc_feature (1)..( 15): Result.005 file - promoters50/1808072
aaaattttatatata

SEQ ID NO: 177987 - DNA, 15 bp, Unknown
  misc_feature (1)..( 15): Result.005 file - promoters50/1808072
ggaaattaaaatcta

SEQ ID NO: 177988 - DNA, 15 bp, Unknown
  misc_feature (1)..( 15): Result.005 file - promoters50/1808072
aagagttaaaatcaa

SEQ ID NO: 177989 - DNA, 16 bp, Unknown
  misc_feature (1)..( 16): Result.005 file - promoters50/1808072
aaagattacaaaacat

SEQ ID NO: 177990 - DNA, 10 bp, Unknown
  misc_feature (1)..( 10): Result.005 file - promoters50/1808072
aaaattatcc

SEQ ID NO: 177991 - DNA, 10 bp, Unknown
  misc_feature (1)..( 10): Result.005 file - promoters50/1808072
taaattatat

SEQ ID NO: 177992 - DNA, 10 bp, Unknown
  misc_feature (1)..( 10): Result.005 file - promoters50/1808072
aaaattcaag

SEQ ID NO: 177993 - DNA, 10 bp, Unknown
  misc_feature (1)..( 10): Result.005 file - promoters50/1808072
taaattaata

SEQ ID NO: 177994 - DNA, 10 bp, Unknown
  misc_feature (1)..( 10): Result.005 file - promoters50/1808072
ccaattttat

SEQ ID NO: 177995 - DNA, 14 bp, Unknown
  misc_feature (1)..( 14): Result.005 file - promoters50/1808072
cgagtttttttata

SEQ ID NO: 177996 - DNA, 14 bp, Unknown
  misc_feature (1)..( 14): Result.005 file - promoters50/1808072
ttcccaattttatg

SEQ ID NO: 177997 - DNA, 14 bp, Unknown
  misc_feature (1)..( 14): Result.005 file - promoters50/1808072
tcataaattatatt

SEQ ID NO: 177998 - DNA, 14 bp, Unknown
  misc_feature (1)..( 14): Result.005 file - promoters50/1808072
tcaaaaattaccaa

SEQ ID NO: 177999 - DNA, 14 bp, Unknown
  misc_feature (1)..( 14): Result.005 file - promoters50/1808072
tccaaaatcataaa

SEQ ID NO: 178000 - DNA, 13 bp, Unknown
  misc_feature (1)..( 13): Result.005 file - promoters50/1808072
gcttaactaaaat

SEQ ID NO: 178001 - DNA, 13 bp, Unknown
  misc_feature (1)..( 13): Result.005 file - promoters50/1808072
cataaaccaaaaa

SEQ ID NO: 178002 - DNA, 13 bp, Unknown
  misc_feature (1)..( 13): Result.005 file - promoters50/1808072
tgctaactatgaa

SEQ ID NO: 178003 - DNA, 13 bp, Unknown
  misc_feature (1)..( 13): Result.005 file - promoters50/1808072
caataattcataa

SEQ ID NO: 178004 - DNA, 13 bp, Unknown
  misc_feature (1)..( 13): Result.005 file - promoters50/1808072
tataaattaatat

SEQ ID NO: 178005 - DNA, 13 bp, Unknown
  misc_feature (1)..( 13): Result.005 file - promoters50/1808072
atagcattattat

SEQ ID NO: 178006 - DNA, 11 bp, Unknown
  misc_feature (1)..( 11): Result.005 file - promoters50/1808072
attattatccg

SEQ ID NO: 178007 - DNA, 11 bp, Unknown
  misc_feature (1)..( 11): Result.005 file - promoters50/1808072
gttattaataa

SEQ ID NO: 178008 - DNA, 11 bp, Unknown
  misc_feature (1)..( 11): Result.005 file - promoters50/1808072
gttataaataa

SEQ ID NO: 178009 - DNA, 11 bp, Unknown
  misc_feature (1)..( 11): Result.005 file - promoters50/1808072
attacaaacga

SEQ ID NO: 178010 - DNA, 11 bp, Unknown
  misc_feature (1)..( 11): Result.005 file - promoters50/1808072
tatattaattt

SEQ ID NO: 178011 - DNA, 14 bp, Unknown
  misc_feature (1)..( 14): Result.005 file - promoters50/1808072
atttaaaaaccata

SEQ ID NO: 178012 - DNA, 14 bp, Unknown
  misc_feature (1)..( 14): Result.005 file - promoters50/1808072
ttttggcaaccata

SEQ ID NO: 178013 - DNA, 14 bp, Unknown
  misc_feature (1)..( 14): Result.005 file - promoters50/1808072
gattacaaaacatg

SEQ ID NO: 178014 - DNA, 14 bp, Unknown
  misc_feature (1)..( 14): Result.005 file - promoters50/1808072
atctacaaaataaa

SEQ ID NO: 178015 - DNA, 14 bp, Unknown
  misc_feature (1)..( 14): Result.005 file - promoters50/1808072
gattataaattagg

SEQ ID NO: 178016 - DNA, 8 bp, Unknown
  misc_feature (1)..( 8): Result.005 file - promoters50/1808088
ttttaccg

SEQ ID NO: 178017 - DNA, 8 bp, Unknown
  misc_feature (1)..( 8): Result.005 file - promoters50/1808088
gttttccg

SEQ ID NO: 178018 - DNA, 8 bp, Unknown
  misc_feature (1)..( 8): Result.005 file - promoters50/1808088
ttttacca

SEQ ID NO: 178019 - DNA, 8 bp, Unknown
  misc_feature (1)..( 8): Result.005 file - promoters50/1808088
taaaaaaa

SEQ ID NO: 178020 - DNA, 8 bp, Unknown
  misc_feature (1)..( 8): Result.005 file - promoters50/1808088
acaaaaaa

SEQ ID NO: 178021 - DNA, 8 bp, Unknown
  misc_feature (1)..( 8): Result.005 file - promoters50/1808088
acacaaac

SEQ ID NO: 178022 - DNA, 11 bp, Unknown
  misc_feature (1)..( 11): Result.005 file - promoters50/1808088
aaagaagatac

SEQ ID NO: 178023 - DNA, 11 bp, Unknown
  misc_feature (1)..( 11): Result.005 file - promoters50/1808088
aaagaggattg

SEQ ID NO: 178024 - DNA, 11 bp, Unknown
  misc_feature (1)..( 11): Result.005 file - promoters50/1808088
tgagaggcttg

SEQ ID NO: 178025 - DNA, 7 bp, Unknown
  misc_feature (1)..( 7): Result.005 file - promoters50/1808088
taaaaaa

SEQ ID NO: 178026 - DNA, 7 bp, Unknown
  misc_feature (1)..( 7): Result.005 file - promoters50/1808088
taaaaag

SEQ ID NO: 178027 - DNA, 7 bp, Unknown
  misc_feature (1)..( 7): Result.005 file - promoters50/1808088
aaaaaag

SEQ ID NO: 178028 - DNA, 9 bp, Unknown
  misc_feature (1)..( 9): Result.005 file - promoters50/1808111
caaaaaaaa

SEQ ID NO: 178029 - DNA, 9 bp, Unknown
  misc_feature (1)..( 9): Result.005 file - promoters50/1808111
taaaaaagg

SEQ ID NO: 178030 - DNA, 9 bp, Unknown
  misc_feature (1)..( 9): Result.005 file - promoters50/1808111
taaaaaaaa

SEQ ID NO: 178031 - DNA, 10 bp, Unknown
  misc_feature (1)..( 10): Result.005 file - promoters50/1808111
caaaacaaaa

SEQ ID NO: 178032 - DNA, 10 bp, Unknown
  misc_feature (1)..( 10): Result.005 file - promoters50/1808111
taaagaaagc

SEQ ID NO: 178033 - DNA, 10 bp, Unknown
  misc_feature (1)..( 10): Result.005 file - promoters50/1808111
cctagaaagt

SEQ ID NO: 178034 - DNA, 8 bp, Unknown
  misc_feature (1)..( 8): Result.005 file - promoters50/1808111
aaaaatca

SEQ ID NO: 178035 - DNA, 8 bp, Unknown
  misc_feature (1)..( 8): Result.005 file - promoters50/1808111
aaaaattt

SEQ ID NO: 178036 - DNA, 8 bp, Unknown
  misc_feature (1)..( 8): Result.005 file - promoters50/1808111
aaaaatgc

SEQ ID NO: 178037 - DNA, 8 bp, Unknown
  misc_feature (1)..( 8): Result.005 file - promoters50/1808111
gaaaatta

SEQ ID NO: 178038 - DNA, 8 bp, Unknown
  misc_feature (1)..( 8): Result.005 file - promoters50/1808111
aaaaatgc

SEQ ID NO: 178039 - DNA, 8 bp, Unknown
  misc_feature (1)..( 8): Result.005 file - promoters50/1808111
tataaaaa

SEQ ID NO: 178040 - DNA, 8 bp, Unknown
  misc_feature (1)..( 8): Result.005 file - promoters50/1808111
tatataaa

SEQ ID NO: 178041 - DNA, 8 bp, Unknown
  misc_feature (1)..( 8): Result.005 file - promoters50/1808111
tatataaa

SEQ ID NO: 178042 - DNA, 8 bp, Unknown
  misc_feature (1)..( 8): Result.005 file - promoters50/1808111
tttataaa

SEQ ID NO: 178043 - DNA, 8 bp, Unknown
  misc_feature (1)..( 8): Result.005 file - promoters50/1808111
catataaa

SEQ ID NO: 178044 - DNA, 11 bp, Unknown
  misc_feature (1)..( 11): Result.005 file - promoters50/1808111
aaaaaaaaaaa

SEQ ID NO: 178045 - DNA, 11 bp, Unknown
  misc_feature (1)..( 11): Result.005 file - promoters50/1808111
ataaagaaagc

SEQ ID NO: 178046 - DNA, 11 bp, Unknown
  misc_feature (1)..( 11): Result.005 file - promoters50/1808111
ttaaaaaaaag

SEQ ID NO: 178047 - DNA, 11 bp, Unknown
  misc_feature (1)..( 11): Result.005 file - promoters50/1808111
caaaacaaaac

SEQ ID NO: 178048 - DNA, 12 bp, Unknown
  misc_feature (1)..( 12): Result.005 file - promoters50/1808111
aaaaatcaaaac

SEQ ID NO: 178049 - DNA, 8 bp, Unknown
  misc_feature (1)..( 8): Result.005 file - promoters50/1808145
tgagttta

SEQ ID NO: 178050 - DNA, 8 bp, Unknown
  misc_feature (1)..( 8): Result.005 file - promoters50/1808145
tgaatttc

SEQ ID NO: 178051 - DNA, 8 bp, Unknown
  misc_feature (1)..( 8): Result.005 file - promoters50/1808145
agagctta

SEQ ID NO: 178052 - DNA, 8 bp, Unknown
  misc_feature (1)..( 8): Result.005 file - promoters50/1808145
atagttta

SEQ ID NO: 178053 - DNA, 8 bp, Unknown
  misc_feature (1)..( 8): Result.005 file - promoters50/1808145
atataaac

SEQ ID NO: 178054 - DNA, 8 bp, Unknown
  misc_feature (1)..( 8): Result.005 file - promoters50/1808145
atagaaag

SEQ ID NO: 178055 - DNA, 8 bp, Unknown
  misc_feature (1)..( 8): Result.005 file - promoters50/1808145
gtaggaag

SEQ ID NO: 178056 - DNA, 8 bp, Unknown
  misc_feature (1)..( 8): Result.005 file - promoters50/1808145
acatggtt

SEQ ID NO: 178057 - DNA, 8 bp, Unknown
  misc_feature (1)..( 8): Result.005 file - promoters50/1808145
acaaggtc

SEQ ID NO: 178058 - DNA, 8 bp, Unknown
  misc_feature (1)..( 8): Result.005 file - promoters50/1808145
ccatggtt

SEQ ID NO: 178059 - DNA, 12 bp, Unknown
  misc_feature (1)..( 12): Result.005 file - promoters50/1808145
agcccatttgaa

SEQ ID NO: 178060 - DNA, 12 bp, Unknown
  misc_feature (1)..( 12): Result.005 file - promoters50/1808145
agcccaattgaa

SEQ ID NO: 178061 - DNA, 12 bp, Unknown
  misc_feature (1)..( 12): Result.005 file - promoters50/1808145
tgcccatggctg

SEQ ID NO: 178062 - DNA, 10 bp, Unknown
  misc_feature (1)..( 10): Result.005 file - promoters50/1808156
caatatgatt

SEQ ID NO: 178063 - DNA, 10 bp, Unknown
  misc_feature (1)..( 10): Result.005 file - promoters50/1808156
aaatttgaac

SEQ ID NO: 178064 - DNA, 10 bp, Unknown
  misc_feature (1)..( 10): Result.005 file - promoters50/1808156
caatgtgaaa

SEQ ID NO: 178065 - DNA, 10 bp, Unknown
  misc_feature (1)..( 10): Result.005 file - promoters50/1808156
taatttcaac

SEQ ID NO: 178066 - DNA, 11 bp, Unknown
  misc_feature (1)..( 11): Result.005 file - promoters50/1808156
aaactttgatt

SEQ ID NO: 178067 - DNA, 11 bp, Unknown
  misc_feature (1)..( 11): Result.005 file - promoters50/1808156
tcaatttcaca

SEQ ID NO: 178068 - DNA, 11 bp, Unknown
  misc_feature (1)..( 11): Result.005 file - promoters50/1808156
ttaatgagaag

SEQ ID NO: 178069 - DNA, 10 bp, Unknown
  misc_feature (1)..( 10): Result.005 file - promoters50/1808168
taaaataaac

SEQ ID NO: 178070 - DNA, 10 bp, Unknown
  misc_feature (1)..( 10): Result.005 file - promoters50/1808168
aaaaagaaaa

SEQ ID NO: 178071 - DNA, 10 bp, Unknown
  misc_feature (1)..( 10): Result.005 file - promoters50/1808168
ttaatgaaat

SEQ ID NO: 178072 - DNA, 10 bp, Unknown
  misc_feature (1)..( 10): Result.005 file - promoters50/1808168
caaactaacc

SEQ ID NO: 178073 - DNA, 10 bp, Unknown
  misc_feature (1)..( 10): Result.005 file - promoters50/1808168
taaaatacta

SEQ ID NO: 178074 - DNA, 10 bp, Unknown
  misc_feature (1)..( 10): Result.005 file - promoters50/1808168
ttagataatt

SEQ ID NO: 178075 - DNA, 10 bp, Unknown
  misc_feature (1)..( 10): Result.005 file - promoters50/1808168
acaaatacca

SEQ ID NO: 178076 - DNA, 8 bp, Unknown
  misc_feature (1)..( 8): Result.005 file - promoters50/1808168
cataaaca

SEQ ID NO: 178077 - DNA, 8 bp, Unknown
  misc_feature (1)..( 8): Result.005 file - promoters50/1808168
tataaacg

SEQ ID NO: 178078 - DNA, 8 bp, Unknown
  misc_feature (1)..( 8): Result.005 file - promoters50/1808168
tataaatt

SEQ ID NO: 178079 - DNA, 8 bp, Unknown
  misc_feature (1)..( 8): Result.005 file - promoters50/1808168
aataaaca

SEQ ID NO: 178080 - DNA, 8 bp, Unknown
  misc_feature (1)..( 8): Result.005 file - promoters50/1808168
tatcaatt

SEQ ID NO: 178081 - DNA, 8 bp, Unknown
  misc_feature (1)..( 8): Result.005 file - promoters50/1808168
aatcaata

SEQ ID NO: 178082 - DNA, 10 bp, Unknown
  misc_feature (1)..( 10): Result.005 file - promoters50/1808172
taaattttga

SEQ ID NO: 178083 - DNA, 10 bp, Unknown
  misc_feature (1)..( 10): Result.005 file - promoters50/1808172
aaaagtttat

SEQ ID NO: 178084 - DNA, 10 bp, Unknown
  misc_feature (1)..( 10): Result.005 file - promoters50/1808172
catattctga

SEQ ID NO: 178085 - DNA, 10 bp, Unknown
  misc_feature (1)..( 10): Result.005 file - promoters50/1808172
aaaatttatc

SEQ ID NO: 178086 - DNA, 10 bp, Unknown
  misc_feature (1)..( 10): Result.005 file - promoters50/1808172
caaattgatc

SEQ ID NO: 178087 - DNA, 10 bp, Unknown
  misc_feature (1)..( 10): Result.005 file - promoters50/1808172
ctaatatata

SEQ ID NO: 178088 - DNA, 11 bp, Unknown
  misc_feature (1)..( 11): Result.005 file - promoters50/1808172
agttaactttg

SEQ ID NO: 178089 - DNA, 11 bp, Unknown
  misc_feature (1)..( 11): Result.005 file - promoters50/1808172
aattaacttat

SEQ ID NO: 178090 - DNA, 11 bp, Unknown
  misc_feature (1)..( 11): Result.005 file - promoters50/1808172
agtcaacttgt

SEQ ID NO: 178091 - DNA, 12 bp, Unknown
  misc_feature (1)..( 12): Result.005 file - promoters50/1808172
tattaaccttga

SEQ ID NO: 178092 - DNA, 12 bp, Unknown
  misc_feature (1)..( 12): Result.005 file - promoters50/1808172
ttaagaacttta

SEQ ID NO: 178093 - DNA, 12 bp, Unknown
  misc_feature (1)..( 12): Result.005 file - promoters50/1808172
aataaaacatgt

SEQ ID NO: 178094 - DNA, 15 bp, Unknown
  misc_feature (1)..( 15): Result.005 file - promoters50/1808172
gaaatcataatagag

SEQ ID NO: 178095 - DNA, 15 bp, Unknown
  misc_feature (1)..( 15): Result.005 file - promoters50/1808172
tcaattatatatata

SEQ ID NO: 178096 - DNA, 15 bp, Unknown
  misc_feature (1)..( 15): Result.005 file - promoters50/1808172
aaaataataataaaa

SEQ ID NO: 178097 - DNA, 15 bp, Unknown
  misc_feature (1)..( 15): Result.005 file - promoters50/1808172
ccaactatccaaaat

SEQ ID NO: 178098 - DNA, 15 bp, Unknown
  misc_feature (1)..( 15): Result.005 file - promoters50/1808172
ctacttattccatta

SEQ ID NO: 178099 - DNA, 15 bp, Unknown
  misc_feature (1)..( 15): Result.005 file - promoters50/1808172
ctttttatatgttat

SEQ ID NO: 178100 - DNA, 15 bp, Unknown
  misc_feature (1)..( 15): Result.005 file - promoters50/1808172
taactgatttttcat

SEQ ID NO: 178101 - DNA, 15 bp, Unknown
  misc_feature (1)..( 15): Result.005 file - promoters50/1808172
aaaattaaagtcaat

SEQ ID NO: 178102 - DNA, 11 bp, Unknown
  misc_feature (1)..( 11): Result.005 file - promoters50/1808172
actatgagaaa

SEQ ID NO: 178103 - DNA, 11 bp, Unknown
  misc_feature (1)..( 11): Result.005 file - promoters50/1808172
tatataagaaa

SEQ ID NO: 178104 - DNA, 11 bp, Unknown
  misc_feature (1)..( 11): Result.005 file - promoters50/1808172
aaaatgaaaaa

SEQ ID NO: 178105 - DNA, 11 bp, Unknown
  misc_feature (1)..( 11): Result.005 file - promoters50/1808172
tttatctaatc

SEQ ID NO: 178106 - DNA, 11 bp, Unknown
  misc_feature (1)..( 11): Result.005 file - promoters50/1808172
gctatctaact

SEQ ID NO: 178107 - DNA, 11 bp, Unknown
  misc_feature (1)..( 11): Result.005 file - promoters50/1808172
aaaattaaagt

SEQ ID NO: 178108 - DNA, 11 bp, Unknown
  misc_feature (1)..( 11): Result.005 file - promoters50/1808172
gttacctagct

SEQ ID NO: 178109 - DNA, 15 bp, Unknown
  misc_feature (1)..( 15): Result.005 file - promoters50/1808172
aaataataaagttaa

SEQ ID NO: 178110 - DNA, 15 bp, Unknown
  misc_feature (1)..( 15): Result.005 file - promoters50/1808172
aaatattaaccttga

SEQ ID NO: 178111 - DNA, 15 bp, Unknown
  misc_feature (1)..( 15): Result.005 file - promoters50/1808172
gcttaataaaacatg

SEQ ID NO: 178112 - DNA, 15 bp, Unknown
  misc_feature (1)..( 15): Result.005 file - promoters50/1808172
caaaattgaccctga

SEQ ID NO: 178113 - DNA, 15 bp, Unknown
  misc_feature (1)..( 15): Result.005 file - promoters50/1808172
ttttaatagacagct

SEQ ID NO: 178114 - DNA, 15 bp, Unknown
  misc_feature (1)..( 15): Result.005 file - promoters50/1808172
aaagattacatagtc

SEQ ID NO: 178115 - DNA, 11 bp, Unknown
  misc_feature (1)..( 11): Result.005 file - promoters50/1808172
aaagcaaacaa

SEQ ID NO: 178116 - DNA, 11 bp, Unknown
  misc_feature (1)..( 11): Result.005 file - promoters50/1808172
aaaacaaagac

SEQ ID NO: 178117 - DNA, 11 bp, Unknown
  misc_feature (1)..( 11): Result.005 file - promoters50/1808172
taaataaaaga

SEQ ID NO: 178118 - DNA, 11 bp, Unknown
  misc_feature (1)..( 11): Result.005 file - promoters50/1808172
accataaaact

SEQ ID NO: 178119 - DNA, 11 bp, Unknown
  misc_feature (1)..( 11): Result.005 file - promoters50/1808172
gaaagaaaaac

SEQ ID NO: 178120 - DNA, 11 bp, Unknown
  misc_feature (1)..( 11): Result.005 file - promoters50/1808172
ttattaaaaac

SEQ ID NO: 178121 - DNA, 12 bp, Unknown
  misc_feature (1)..( 12): Result.005 file - promoters50/1808172
catatattcagt

SEQ ID NO: 178122 - DNA, 12 bp, Unknown
  misc_feature (1)..( 12): Result.005 file - promoters50/1808172
tctatattgttt

SEQ ID NO: 178123 - DNA, 12 bp, Unknown
  misc_feature (1)..( 12): Result.005 file - promoters50/1808172
aatacatttcat

SEQ ID NO: 178124 - DNA, 12 bp, Unknown
  misc_feature (1)..( 12): Result.005 file - promoters50/1808172
catgtatgatga

SEQ ID NO: 178125 - DNA, 12 bp, Unknown
  misc_feature (1)..( 12): Result.005 file - promoters50/1808172
tctctatttttt

SEQ ID NO: 178126 - DNA, 12 bp, Unknown
  misc_feature (1)..( 12): Result.005 file - promoters50/1808172
ttcttattttaa

SEQ ID NO: 178127 - DNA, 8 bp, Unknown
  misc_feature (1)..( 8): Result.005 file - promoters50/1808172
caataatg

SEQ ID NO: 178128 - DNA, 8 bp, Unknown
  misc_feature (1)..( 8): Result.005 file - promoters50/1808172
caataaat

SEQ ID NO: 178129 - DNA, 8 bp, Unknown
  misc_feature (1)..( 8): Result.005 file - promoters50/1808172
aaataatg

SEQ ID NO: 178130 - DNA, 8 bp, Unknown
  misc_feature (1)..( 8): Result.005 file - promoters50/1808172
aaataaac

SEQ ID NO: 178131 - DNA, 8 bp, Unknown
  misc_feature (1)..( 8): Result.005 file - promoters50/1808172
aaacaaaa

SEQ ID NO: 178132 - DNA, 8 bp, Unknown
  misc_feature (1)..( 8): Result.005 file - promoters50/1808172
aaagaaat

SEQ ID NO: 178133 - DNA, 10 bp, Unknown
  misc_feature (1)..( 10): Result.005 file - promoters50/1808172
acaataaata

SEQ ID NO: 178134 - DNA, 10 bp, Unknown
  misc_feature (1)..( 10): Result.005 file - promoters50/1808172
ataataaatc

SEQ ID NO: 178135 - DNA, 10 bp, Unknown
  misc_feature (1)..( 10): Result.005 file - promoters50/1808172
ccaaaaaaaa

SEQ ID NO: 178136 - DNA, 10 bp, Unknown
  misc_feature (1)..( 10): Result.005 file - promoters50/1808172
ccaaaaccaa

SEQ ID NO: 178137 - DNA, 11 bp, Unknown
  misc_feature (1)..( 11): Result.005 file - promoters50/1808172
ggaaagaaaaa

SEQ ID NO: 178138 - DNA, 11 bp, Unknown
  misc_feature (1)..( 11): Result.005 file - promoters50/1808172
ttaaaaactta

SEQ ID NO: 178139 - DNA, 11 bp, Unknown
  misc_feature (1)..( 11): Result.005 file - promoters50/1808172
tatataacaca

SEQ ID NO: 178140 - DNA, 11 bp, Unknown
  misc_feature (1)..( 11): Result.005 file - promoters50/1808172
gatataataca

SEQ ID NO: 178141 - DNA, 12 bp, Unknown
  misc_feature (1)..( 12): Result.005 file - promoters50/1808172
attatatataga

SEQ ID NO: 178142 - DNA, 12 bp, Unknown
  misc_feature (1)..( 12): Result.005 file - promoters50/1808172
catataaataga

SEQ ID NO: 178143 - DNA, 12 bp, Unknown
  misc_feature (1)..( 12): Result.005 file - promoters50/1808172
agtataaataaa

SEQ ID NO: 178144 - DNA, 12 bp, Unknown
  misc_feature (1)..( 12): Result.005 file - promoters50/1808172
cctatatataaa

SEQ ID NO: 178145 - DNA, 10 bp, Unknown
  misc_feature (1)..( 10): Result.005 file - promoters50/1808172
tttatttttt

SEQ ID NO: 178146 - DNA, 10 bp, Unknown
  misc_feature (1)..( 10): Result.005 file - promoters50/1808172
cttctttttt

SEQ ID NO: 178147 - DNA, 10 bp, Unknown
  misc_feature (1)..( 10): Result.005 file - promoters50/1808172
tttctttttg

SEQ ID NO: 178148 - DNA, 10 bp, Unknown
  misc_feature (1)..( 10): Result.005 file - promoters50/1808172
ttaattttct

SEQ ID NO: 178149 - DNA, 10 bp, Unknown
  misc_feature (1)..( 10): Result.005 file - promoters50/1808172
aaccttttta

SEQ ID NO: 178150 - DNA, 10 bp, Unknown
  misc_feature (1)..( 10): Result.005 file - promoters50/1808172
ataattttgc

SEQ ID NO: 178151 - DNA, 12 bp, Unknown
  misc_feature (1)..( 12): Result.005 file - promoters50/1808172
gtatataaccca

SEQ ID NO: 178152 - DNA, 12 bp, Unknown
  misc_feature (1)..( 12): Result.005 file - promoters50/1808172
taataaaacatt

SEQ ID NO: 178153 - DNA, 12 bp, Unknown
  misc_feature (1)..( 12): Result.005 file - promoters50/1808172
gtttaaaacaaa

SEQ ID NO: 178154 - DNA, 12 bp, Unknown
  misc_feature (1)..( 12): Result.005 file - promoters50/1808172
aaataaaccttt

SEQ ID NO: 178155 - DNA, 12 bp, Unknown
  misc_feature (1)..( 12): Result.005 file - promoters50/1808172
ggttaaaaaaga

SEQ ID NO: 178156 - DNA, 12 bp, Unknown
  misc_feature (1)..( 12): Result.005 file - promoters50/1808172
ttcttaaacaaa

SEQ ID NO: 178157 - DNA, 9 bp, Unknown
  misc_feature (1)..( 9): Result.005 file - promoters50/1808172
taaaacaaa

SEQ ID NO: 178158 - DNA, 9 bp, Unknown
  misc_feature (1)..( 9): Result.005 file - promoters50/1808172
ttaaacaaa

SEQ ID NO: 178159 - DNA, 9 bp, Unknown
  misc_feature (1)..( 9): Result.005 file - promoters50/1808172
taaaacatt

SEQ ID NO: 178160 - DNA, 9 bp, Unknown
  misc_feature (1)..( 9): Result.005 file - promoters50/1808172
acaaataaa

SEQ ID NO: 178161 - DNA, 9 bp, Unknown
  misc_feature (1)..( 9): Result.005 file - promoters50/1808172
aaaaagaaa

SEQ ID NO: 178162 - DNA, 9 bp, Unknown
  misc_feature (1)..( 9): Result.005 file - promoters50/1808172
ttaaagaaa

SEQ ID NO: 178163 - DNA, 9 bp, Unknown
  misc_feature (1)..( 9): Result.005 file - promoters50/1808184
aattttcaa

SEQ ID NO: 178164 - DNA, 9 bp, Unknown
  misc_feature (1)..( 9): Result.005 file - promoters50/1808184
gatttacaa

SEQ ID NO: 178165 - DNA, 9 bp, Unknown
  misc_feature (1)..( 9): Result.005 file - promoters50/1808184
aattttttt

SEQ ID NO: 178166 - DNA, 9 bp, Unknown
  misc_feature (1)..( 9): Result.005 file - promoters50/1808184
attttacat

SEQ ID NO: 178167 - DNA, 10 bp, Unknown
  misc_feature (1)..( 10): Result.005 file - promoters50/1808184
tttttgacac

SEQ ID NO: 178168 - DNA, 10 bp, Unknown
  misc_feature (1)..( 10): Result.005 file - promoters50/1808184
cactttatga

SEQ ID NO: 178169 - DNA, 12 bp, Unknown
  misc_feature (1)..( 12): Result.005 file - promoters50/1808490
cagttattggtt

SEQ ID NO: 178170 - DNA, 12 bp, Unknown
  misc_feature (1)..( 12): Result.005 file - promoters50/1808490
tatgaatttgtt

SEQ ID NO: 178171 - DNA, 12 bp, Unknown
  misc_feature (1)..( 12): Result.005 file - promoters50/1808490
gttgactttgaa

SEQ ID NO: 178172 - DNA, 12 bp, Unknown
  misc_feature (1)..( 12): Result.005 file - promoters50/1808490
gttaacttaaca

SEQ ID NO: 178173 - DNA, 10 bp, Unknown
  misc_feature (1)..( 10): Result.005 file - promoters50/1808490
aaaaacttag

SEQ ID NO: 178174 - DNA, 10 bp, Unknown
  misc_feature (1)..( 10): Result.005 file - promoters50/1808490
caaaacttgt

SEQ ID NO: 178175 - DNA, 10 bp, Unknown
  misc_feature (1)..( 10): Result.005 file - promoters50/1808490
agaaacgtag

SEQ ID NO: 178176 - DNA, 10 bp, Unknown
  misc_feature (1)..( 10): Result.005 file - promoters50/1808490
caaaaccact

SEQ ID NO: 178177 - DNA, 7 bp, Unknown
  misc_feature (1)..( 7): Result.005 file - promoters50/1808549
atcaaat

SEQ ID NO: 178178 - DNA, 7 bp, Unknown
  misc_feature (1)..( 7): Result.005 file - promoters50/1808549
atcaaaa

SEQ ID NO: 178179 - DNA, 7 bp, Unknown
  misc_feature (1)..( 7): Result.005 file - promoters50/1808549
ttcaaat

SEQ ID NO: 178180 - DNA, 10 bp, Unknown
  misc_feature (1)..( 10): Result.005 file - promoters50/1808549
ctaaaaggcc

SEQ ID NO: 178181 - DNA, 10 bp, Unknown
  misc_feature (1)..( 10): Result.005 file - promoters50/1808549
ctaaaattcc

SEQ ID NO: 178182 - DNA, 10 bp, Unknown
  misc_feature (1)..( 10): Result.005 file - promoters50/1808549
ctataatgac

SEQ ID NO: 178183 - DNA, 10 bp, Unknown
  misc_feature (1)..( 10): Result.005 file - promoters50/1808549
tgataatgac

SEQ ID NO: 178184 - DNA, 9 bp, Unknown
  misc_feature (1)..( 9): Result.005 file - promoters50/1808549
attttaaaa

SEQ ID NO: 178185 - DNA, 9 bp, Unknown
  misc_feature (1)..( 9): Result.005 file - promoters50/1808549
atttgaaac

SEQ ID NO: 178186 - DNA, 9 bp, Unknown
  misc_feature (1)..( 9): Result.005 file - promoters50/1808549
caatgaaac

SEQ ID NO: 178187 - DNA, 7 bp, Unknown
  misc_feature (1)..( 7): Result.005 file - promoters50/1808549
actttta

SEQ ID NO: 178188 - DNA, 7 bp, Unknown
  misc_feature (1)..( 7): Result.005 file - promoters50/1808549
tctttta

SEQ ID NO: 178189 - DNA, 7 bp, Unknown
  misc_feature (1)..( 7): Result.005 file - promoters50/1808549
acttttc

SEQ ID NO: 178190 - DNA, 10 bp, Unknown
  misc_feature (1)..( 10): Result.005 file - promoters50/1808549
aataactttg

SEQ ID NO: 178191 - DNA, 10 bp, Unknown
  misc_feature (1)..( 10): Result.005 file - promoters50/1808549
aataactaaa

SEQ ID NO: 178192 - DNA, 10 bp, Unknown
  misc_feature (1)..( 10): Result.005 file - promoters50/1808549
gttaacgaaa

SEQ ID NO: 178193 - DNA, 11 bp, Unknown
  misc_feature (1)..( 11): Result.005 file - promoters50/1808572
actaattaata

SEQ ID NO: 178194 - DNA, 11 bp, Unknown
  misc_feature (1)..( 11): Result.005 file - promoters50/1808572
actaatttgta

SEQ ID NO: 178195 - DNA, 11 bp, Unknown
  misc_feature (1)..( 11): Result.005 file - promoters50/1808572
aataattagta

SEQ ID NO: 178196 - DNA, 8 bp, Unknown
  misc_feature (1)..( 8): Result.005 file - promoters50/1808572
ataaatta

SEQ ID NO: 178197 - DNA, 8 bp, Unknown
  misc_feature (1)..( 8): Result.005 file - promoters50/1808572
gtaaatta

SEQ ID NO: 178198 - DNA, 8 bp, Unknown
  misc_feature (1)..( 8): Result.005 file - promoters50/1808572
gtaaataa

SEQ ID NO: 178199 - DNA, 7 bp, Unknown
  misc_feature (1)..( 7): Result.005 file - promoters50/1808572
aaaaaaa

SEQ ID NO: 178200 - DNA, 7 bp, Unknown
  misc_feature (1)..( 7): Result.005 file - promoters50/1808572
aaaaaaa

SEQ ID NO: 178201 - DNA, 7 bp, Unknown
  misc_feature (1)..( 7): Result.005 file - promoters50/1808572
aaaaaac

SEQ ID NO: 178202 - DNA, 9 bp, Unknown
  misc_feature (1)..( 9): Result.005 file - promoters50/1808572
ttattttat

SEQ ID NO: 178203 - DNA, 9 bp, Unknown
  misc_feature (1)..( 9): Result.005 file - promoters50/1808572
ttaatttat

SEQ ID NO: 178204 - DNA, 9 bp, Unknown
  misc_feature (1)..( 9): Result.005 file - promoters50/1808572
tttttttga

SEQ ID NO: 178205 - DNA, 8 bp, Unknown
  misc_feature (1)..( 8): Result.005 file - promoters50/1808572
taataaag

SEQ ID NO: 178206 - DNA, 8 bp, Unknown
  misc_feature (1)..( 8): Result.005 file - promoters50/1808572
atataaag

SEQ ID NO: 178207 - DNA, 8 bp, Unknown
  misc_feature (1)..( 8): Result.005 file - promoters50/1808572
atataaat

SEQ ID NO: 178208 - DNA, 8 bp, Unknown
  misc_feature (1)..( 8): Result.005 file - promoters50/1808635
tctcaatt

SEQ ID NO: 178209 - DNA, 8 bp, Unknown
  misc_feature (1)..( 8): Result.005 file - promoters50/1808635
tgtcaatt

SEQ ID NO: 178210 - DNA, 8 bp, Unknown
  misc_feature (1)..( 8): Result.005 file - promoters50/1808635
tgtgaatt

SEQ ID NO: 178211 - DNA, 9 bp, Unknown
  misc_feature (1)..( 9): Result.005 file - promoters50/1808696
cactagtta

SEQ ID NO: 178212 - DNA, 9 bp, Unknown
  misc_feature (1)..( 9): Result.005 file - promoters50/1808696
gactagtat

SEQ ID NO: 178213 - DNA, 9 bp, Unknown
  misc_feature (1)..( 9): Result.005 file - promoters50/1808696
gtctattat

SEQ ID NO: 178214 - DNA, 9 bp, Unknown
  misc_feature (1)..( 9): Result.005 file - promoters50/1808696
aattattac

SEQ ID NO: 178215 - DNA, 9 bp, Unknown
  misc_feature (1)..( 9): Result.005 file - promoters50/1808696
aattatgtt

SEQ ID NO: 178216 - DNA, 11 bp, Unknown
  misc_feature (1)..( 11): Result.005 file - promoters50/1808696
atacagatata

SEQ ID NO: 178217 - DNA, 11 bp, Unknown
  misc_feature (1)..( 11): Result.005 file - promoters50/1808696
cgatagatata

SEQ ID NO: 178218 - DNA, 11 bp, Unknown
  misc_feature (1)..( 11): Result.005 file - promoters50/1808696
gcatacaaata

SEQ ID NO: 178219 - DNA, 12 bp, Unknown
  misc_feature (1)..( 12): Result.005 file - promoters50/1808696
aaaaagaatagc

SEQ ID NO: 178220 - DNA, 12 bp, Unknown
  misc_feature (1)..( 12): Result.005 file - promoters50/1808696
tgtaataaaaag

SEQ ID NO: 178221 - DNA, 9 bp, Unknown
  misc_feature (1)..( 9): Result.005 file - promoters50/1808696
tataaggtt

SEQ ID NO: 178222 - DNA, 9 bp, Unknown
  misc_feature (1)..( 9): Result.005 file - promoters50/1808696
cttaacgtt

SEQ ID NO: 178223 - DNA, 8 bp, Unknown
  misc_feature (1)..( 8): Result.005 file - promoters50/1808696
atacggtg

SEQ ID NO: 178224 - DNA, 9 bp, Unknown
  misc_feature (1)..( 9): Result.005 file - promoters50/1808696
tctaaagtt

SEQ ID NO: 178225 - DNA, 9 bp, Unknown
  misc_feature (1)..( 9): Result.005 file - promoters50/1808696
atcaaaaga

SEQ ID NO: 178226 - DNA, 9 bp, Unknown
  misc_feature (1)..( 9): Result.005 file - promoters50/1808753
tataaacaa

SEQ ID NO: 178227 - DNA, 9 bp, Unknown
  misc_feature (1)..( 9): Result.005 file - promoters50/1808753
tgtaatcaa

SEQ ID NO: 178228 - DNA, 9 bp, Unknown
  misc_feature (1)..( 9): Result.005 file - promoters50/1808753
aaaaaacaa

SEQ ID NO: 178229 - DNA, 6 bp, Unknown
  misc_feature (1)..( 6): Result.005 file - promoters50/1808753
acatac

SEQ ID NO: 178230 - DNA, 6 bp, Unknown
  misc_feature (1)..( 6): Result.005 file - promoters50/1808753
acatac

SEQ ID NO: 178231 - DNA, 6 bp, Unknown
  misc_feature (1)..( 6): Result.005 file - promoters50/1808753
acatac

SEQ ID NO: 178232 - DNA, 8 bp, Unknown
  misc_feature (1)..( 8): Result.005 file - promoters50/1809003
catttttt

SEQ ID NO: 178233 - DNA, 8 bp, Unknown
  misc_feature (1)..( 8): Result.005 file - promoters50/1809003
aatttttc

SEQ ID NO: 178234 - DNA, 8 bp, Unknown
  misc_feature (1)..( 8): Result.005 file - promoters50/1809003
catttttt

SEQ ID NO: 178235 - DNA, 16 bp, Unknown
  misc_feature (1)..( 16): Result.005 file - promoters50/1809088
tcaaaacttaatttat

SEQ ID NO: 178236 - DNA, 16 bp, Unknown
  misc_feature (1)..( 16): Result.005 file - promoters50/1809088
aacaaaattataaaat

SEQ ID NO: 178237 - DNA, 16 bp, Unknown
  misc_feature (1)..( 16): Result.005 file - promoters50/1809088
ggccaaagtatgaaat

SEQ ID NO: 178238 - DNA, 16 bp, Unknown
  misc_feature (1)..( 16): Result.005 file - promoters50/1809088
aacacaatgtcgattt

SEQ ID NO: 178239 - DNA, 16 bp, Unknown
  misc_feature (1)..( 16): Result.005 file - promoters50/1809088
tatcaaactattttca

SEQ ID NO: 178240 - DNA, 14 bp, Unknown
  misc_feature (1)..( 14): Result.005 file - promoters50/1809088
tgatttttacatat

SEQ ID NO: 178241 - DNA, 14 bp, Unknown
  misc_feature (1)..( 14): Result.005 file - promoters50/1809088
ggattttcacaaac

SEQ ID NO: 178242 - DNA, 14 bp, Unknown
  misc_feature (1)..( 14): Result.005 file - promoters50/1809088
tgatttttacatat

SEQ ID NO: 178243 - DNA, 14 bp, Unknown
  misc_feature (1)..( 14): Result.005 file - promoters50/1809088
tcaccttcacaggt

SEQ ID NO: 178244 - DNA, 12 bp, Unknown
  misc_feature (1)..( 12): Result.005 file - promoters50/1809088
tcatccattcat

SEQ ID NO: 178245 - DNA, 12 bp, Unknown
  misc_feature (1)..( 12): Result.005 file - promoters50/1809088
tcagccattcgt

SEQ ID NO: 178246 - DNA, 12 bp, Unknown
  misc_feature (1)..( 12): Result.005 file - promoters50/1809088
ctttccatacat

SEQ ID NO: 178247 - DNA, 12 bp, Unknown
  misc_feature (1)..( 12): Result.005 file - promoters50/1809088
acgtacatataa

SEQ ID NO: 178248 - DNA, 17 bp, Unknown
  misc_feature (1)..( 17): Result.005 file - promoters50/1809088
aaatcttttatatatac

SEQ ID NO: 178249 - DNA, 17 bp, Unknown
  misc_feature (1)..( 17): Result.005 file - promoters50/1809088
aaagcttctatataaac

SEQ ID NO: 178250 - DNA, 17 bp, Unknown
  misc_feature (1)..( 17): Result.005 file - promoters50/1809088
gaagcttagggtttttg

SEQ ID NO: 178251 - DNA, 17 bp, Unknown
  misc_feature (1)..( 17): Result.005 file - promoters50/1809088
tttatcattatttaaac

SEQ ID NO: 178252 - DNA, 18 bp, Unknown
  misc_feature (1)..( 18): Result.005 file - promoters50/1809157
atttgtacaaaacataga

SEQ ID NO: 178253 - DNA, 18 bp, Unknown
  misc_feature (1)..( 18): Result.005 file - promoters50/1809157
aaacaaacaaaaaatgat

SEQ ID NO: 178254 - DNA, 18 bp, Unknown
  misc_feature (1)..( 18): Result.005 file - promoters50/1809157
tgttcaacacaaattttt

SEQ ID NO: 178255 - DNA, 18 bp, Unknown
  misc_feature (1)..( 18): Result.005 file - promoters50/1809157
attgttacaaatctatcc

SEQ ID NO: 178256 - DNA, 18 bp, Unknown
  misc_feature (1)..( 18): Result.005 file - promoters50/1809157
gttagttcaaaaaaaaaa

SEQ ID NO: 178257 - DNA, 18 bp, Unknown
  misc_feature (1)..( 18): Result.005 file - promoters50/1809157
atgtttccaaaatatctt

SEQ ID NO: 178258 - DNA, 13 bp, Unknown
  misc_feature (1)..( 13): Result.005 file - promoters50/1809157
ataaaaccaagac

SEQ ID NO: 178259 - DNA, 13 bp, Unknown
  misc_feature (1)..( 13): Result.005 file - promoters50/1809157
aagaaacaaagta

SEQ ID NO: 178260 - DNA, 13 bp, Unknown
  misc_feature (1)..( 13): Result.005 file - promoters50/1809157
cagacaccaagac

SEQ ID NO: 178261 - DNA, 13 bp, Unknown
  misc_feature (1)..( 13): Result.005 file - promoters50/1809157
tccaaacaaaaca

SEQ ID NO: 178262 - DNA, 13 bp, Unknown
  misc_feature (1)..( 13): Result.005 file - promoters50/1809157
gccaaacaacatt

SEQ ID NO: 178263 - DNA, 13 bp, Unknown
  misc_feature (1)..( 13): Result.005 file - promoters50/1809157
aagaaaaaaaaaa

SEQ ID NO: 178264 - DNA, 11 bp, Unknown
  misc_feature (1)..( 11): Result.005 file - promoters50/1809233
taaaatttcgc

SEQ ID NO: 178265 - DNA, 11 bp, Unknown
  misc_feature (1)..( 11): Result.005 file - promoters50/1809233
taatattaaga

SEQ ID NO: 178266 - DNA, 11 bp, Unknown
  misc_feature (1)..( 11): Result.005 file - promoters50/1809233
agaaattgcgc

SEQ ID NO: 178267 - DNA, 11 bp, Unknown
  misc_feature (1)..( 11): Result.005 file - promoters50/1809233
taatcttagaa

SEQ ID NO: 178268 - DNA, 11 bp, Unknown
  misc_feature (1)..( 11): Result.005 file - promoters50/1809233
ctgaattgcaa

SEQ ID NO: 178269 - DNA, 11 bp, Unknown
  misc_feature (1)..( 11): Result.005 file - promoters50/1809233
gcgaatttgat

SEQ ID NO: 178270 - DNA, 12 bp, Unknown
  misc_feature (1)..( 12): Result.005 file - promoters50/1809233
ttacttcttata

SEQ ID NO: 178271 - DNA, 12 bp, Unknown
  misc_feature (1)..( 12): Result.005 file - promoters50/1809233
ttaattctcagc

SEQ ID NO: 178272 - DNA, 12 bp, Unknown
  misc_feature (1)..( 12): Result.005 file - promoters50/1809233
gatcttcttata

SEQ ID NO: 178273 - DNA, 12 bp, Unknown
  misc_feature (1)..( 12): Result.005 file - promoters50/1809233
ttagatcgtacc

SEQ ID NO: 178274 - DNA, 12 bp, Unknown
  misc_feature (1)..( 12): Result.005 file - promoters50/1809233
catcttctaaaa

SEQ ID NO: 178275 - DNA, 12 bp, Unknown
  misc_feature (1)..( 12): Result.005 file - promoters50/1809233
ttaattgtattt

SEQ ID NO: 178276 - DNA, 10 bp, Unknown
  misc_feature (1)..( 10): Result.005 file - promoters50/1809235
aatgaattta

SEQ ID NO: 178277 - DNA, 10 bp, Unknown
  misc_feature (1)..( 10): Result.005 file - promoters50/1809235
aatgaattta

SEQ ID NO: 178278 - DNA, 7 bp, Unknown
  misc_feature (1)..( 7): Result.005 file - promoters50/1809235
gaaatta

SEQ ID NO: 178279 - DNA, 11 bp, Unknown
  misc_feature (1)..( 11): Result.005 file - promoters50/1809235
ttgaaaaattg

SEQ ID NO: 178280 - DNA, 11 bp, Unknown
  misc_feature (1)..( 11): Result.005 file - promoters50/1809235
ttgataaatgc

SEQ ID NO: 178281 - DNA, 11 bp, Unknown
  misc_feature (1)..( 11): Result.005 file - promoters50/1809235
agctaaaattg

SEQ ID NO: 178282 - DNA, 10 bp, Unknown
  misc_feature (1)..( 10): Result.005 file - promoters50/1809243
aaattaattt

SEQ ID NO: 178283 - DNA, 10 bp, Unknown
  misc_feature (1)..( 10): Result.005 file - promoters50/1809243
aaattagaac

SEQ ID NO: 178284 - DNA, 10 bp, Unknown
  misc_feature (1)..( 10): Result.005 file - promoters50/1809243
taattaattt

SEQ ID NO: 178285 - DNA, 10 bp, Unknown
  misc_feature (1)..( 10): Result.005 file - promoters50/1809243
caatgaatgg

SEQ ID NO: 178286 - DNA, 8 bp, Unknown
  misc_feature (1)..( 8): Result.005 file - promoters50/1809243
tcaatttt

SEQ ID NO: 178287 - DNA, 8 bp, Unknown
  misc_feature (1)..( 8): Result.005 file - promoters50/1809243
acaaattt

SEQ ID NO: 178288 - DNA, 8 bp, Unknown
  misc_feature (1)..( 8): Result.005 file - promoters50/1809243
acacattc

SEQ ID NO: 178289 - DNA, 8 bp, Unknown
  misc_feature (1)..( 8): Result.005 file - promoters50/1809243
acaaatct

SEQ ID NO: 178290 - DNA, 10 bp, Unknown
  misc_feature (1)..( 10): Result.005 file - promoters50/1809253
aataacaata

SEQ ID NO: 178291 - DNA, 10 bp, Unknown
  misc_feature (1)..( 10): Result.005 file - promoters50/1809253
aattacaaaa

SEQ ID NO: 178292 - DNA, 10 bp, Unknown
  misc_feature (1)..( 10): Result.005 file - promoters50/1809253
ttttagaaaa

SEQ ID NO: 178293 - DNA, 10 bp, Unknown
  misc_feature (1)..( 10): Result.005 file - promoters50/1809253
gatttcaaat

SEQ ID NO: 178294 - DNA, 10 bp, Unknown
  misc_feature (1)..( 10): Result.005 file - promoters50/1809253
gatttccggt

SEQ ID NO: 178295 - DNA, 12 bp, Unknown
  misc_feature (1)..( 12): Result.005 file - promoters50/1809253
taataaaaacaa

SEQ ID NO: 178296 - DNA, 12 bp, Unknown
  misc_feature (1)..( 12): Result.005 file - promoters50/1809253
aaataaaagcaa

SEQ ID NO: 178297 - DNA, 12 bp, Unknown
  misc_feature (1)..( 12): Result.005 file - promoters50/1809253
aaatgaaattta

SEQ ID NO: 178298 - DNA, 12 bp, Unknown
  misc_feature (1)..( 12): Result.005 file - promoters50/1809253
taataaaatccc

SEQ ID NO: 178299 - DNA, 12 bp, Unknown
  misc_feature (1)..( 12): Result.005 file - promoters50/1809253
taatatcgaatg

SEQ ID NO: 178300 - DNA, 12 bp, Unknown
  misc_feature (1)..( 12): Result.005 file - promoters50/1809253
aactgaaatttg

SEQ ID NO: 178301 - DNA, 7 bp, Unknown
  misc_feature (1)..( 7): Result.005 file - promoters50/1809253
atatatt

SEQ ID NO: 178302 - DNA, 7 bp, Unknown
  misc_feature (1)..( 7): Result.005 file - promoters50/1809253
atatata

SEQ ID NO: 178303 - DNA, 7 bp, Unknown
  misc_feature (1)..( 7): Result.005 file - promoters50/1809253
ttatatt

SEQ ID NO: 178304 - DNA, 7 bp, Unknown
  misc_feature (1)..( 7): Result.005 file - promoters50/1809253
ataaata

SEQ ID NO: 178305 - DNA, 7 bp, Unknown
  misc_feature (1)..( 7): Result.005 file - promoters50/1809253
ttatatc

SEQ ID NO: 178306 - DNA, 9 bp, Unknown
  misc_feature (1)..( 9): Result.005 file - promoters50/1809253
catcgtttg

SEQ ID NO: 178307 - DNA, 9 bp, Unknown
  misc_feature (1)..( 9): Result.005 file - promoters50/1809253
attcgtttc

SEQ ID NO: 178308 - DNA, 9 bp, Unknown
  misc_feature (1)..( 9): Result.005 file - promoters50/1809253
tttcgttat

SEQ ID NO: 178309 - DNA, 9 bp, Unknown
  misc_feature (1)..( 9): Result.005 file - promoters50/1809253
attagtttc

SEQ ID NO: 178310 - DNA, 9 bp, Unknown
  misc_feature (1)..( 9): Result.005 file - promoters50/1809253
attagtcta

SEQ ID NO: 178311 - DNA, 9 bp, Unknown
  misc_feature (1)..( 9): Result.005 file - promoters50/1809253
attagtagg

SEQ ID NO: 178312 - DNA, 9 bp, Unknown
  misc_feature (1)..( 9): Result.005 file - promoters50/1809253
attagtcta

SEQ ID NO: 178313 - DNA, 9 bp, Unknown
  misc_feature (1)..( 9): Result.005 file - promoters50/1809253
attagtttc

SEQ ID NO: 178314 - DNA, 9 bp, Unknown
  misc_feature (1)..( 9): Result.005 file - promoters50/1809253
attcgtttc

SEQ ID NO: 178315 - DNA, 9 bp, Unknown
  misc_feature (1)..( 9): Result.005 file - promoters50/1809253
cttaattta

SEQ ID NO: 178316 - DNA, 9 bp, Unknown
  misc_feature (1)..( 9): Result.005 file - promoters50/1820893
ggttggttt

SEQ ID NO: 178317 - DNA, 9 bp, Unknown
  misc_feature (1)..( 9): Result.005 file - promoters50/1820893
ttttgtttt

SEQ ID NO: 178318 - DNA, 9 bp, Unknown
  misc_feature (1)..( 9): Result.005 file - promoters50/1820893
ttttgttga

SEQ ID NO: 178319 - DNA, 9 bp, Unknown
  misc_feature (1)..( 9): Result.005 file - promoters50/1820893
cttttattc

SEQ ID NO: 178320 - DNA, 9 bp, Unknown
  misc_feature (1)..( 9): Result.005 file - promoters50/1820893
gaattattc

SEQ ID NO: 178321 - DNA, 9 bp, Unknown
  misc_feature (1)..( 9): Result.005 file - promoters50/1820893
cttttattt

SEQ ID NO: 178322 - DNA, 11 bp, Unknown
  misc_feature (1)..( 11): Result.005 file - promoters50/1830195
caatgaactct

SEQ ID NO: 178323 - DNA, 11 bp, Unknown
  misc_feature (1)..( 11): Result.005 file - promoters50/1830195
atatgaaccat

SEQ ID NO: 178324 - DNA, 11 bp, Unknown
  misc_feature (1)..( 11): Result.005 file - promoters50/1830195
caaggaaagaa

SEQ ID NO: 178325 - DNA, 11 bp, Unknown
  misc_feature (1)..( 11): Result.005 file - promoters50/1830195
agaagaaaatg

SEQ ID NO: 178326 - DNA, 11 bp, Unknown
  misc_feature (1)..( 11): Result.005 file - promoters50/1830195
taagtaaacat

SEQ ID NO: 178327 - DNA, 11 bp, Unknown
  misc_feature (1)..( 11): Result.005 file - promoters50/1830195
taaagaaaaag

SEQ ID NO: 178328 - DNA, 11 bp, Unknown
  misc_feature (1)..( 11): Result.005 file - promoters50/1830195
ctcagaataag

SEQ ID NO: 178329 - DNA, 11 bp, Unknown
  misc_feature (1)..( 11): Result.005 file - promoters50/1830195
cttctatatat

SEQ ID NO: 178330 - DNA, 11 bp, Unknown
  misc_feature (1)..( 11): Result.005 file - promoters50/1830195
ttcctatatat

SEQ ID NO: 178331 - DNA, 11 bp, Unknown
  misc_feature (1)..( 11): Result.005 file - promoters50/1830195
tgtctatatat

SEQ ID NO: 178332 - DNA, 11 bp, Unknown
  misc_feature (1)..( 11): Result.005 file - promoters50/1830195
ctcttatatat

SEQ ID NO: 178333 - DNA, 11 bp, Unknown
  misc_feature (1)..( 11): Result.005 file - promoters50/1830195
ctcctataaat

SEQ ID NO: 178334 - DNA, 11 bp, Unknown
  misc_feature (1)..( 11): Result.005 file - promoters50/1830195
ttcctttatat

SEQ ID NO: 178335 - DNA, 7 bp, Unknown
  misc_feature (1)..( 7): Result.005 file - promoters50/1837627
gattttt

SEQ ID NO: 178336 - DNA, 7 bp, Unknown
  misc_feature (1)..( 7): Result.005 file - promoters50/1837627
gatttta

SEQ ID NO: 178337 - DNA, 7 bp, Unknown
  misc_feature (1)..( 7): Result.005 file - promoters50/1837627
aattttt

SEQ ID NO: 178338 - DNA, 12 bp, Unknown
  misc_feature (1)..( 12): Result.005 file - promoters50/1837627
tgtttttttata

SEQ ID NO: 178339 - DNA, 12 bp, Unknown
  misc_feature (1)..( 12): Result.005 file - promoters50/1837627
acggattttatt

SEQ ID NO: 178340 - DNA, 12 bp, Unknown
  misc_feature (1)..( 12): Result.005 file - promoters50/1837627
tttttttttaaa

SEQ ID NO: 178341 - DNA, 11 bp, Unknown
  misc_feature (1)..( 11): Result.005 file - promoters50/1837627
aaaataataat

SEQ ID NO: 178342 - DNA, 11 bp, Unknown
  misc_feature (1)..( 11): Result.005 file - promoters50/1837627
caaatattaat

SEQ ID NO: 178343 - DNA, 11 bp, Unknown
  misc_feature (1)..( 11): Result.005 file - promoters50/1837627
aaaataaatac

SEQ ID NO: 178344 - DNA, 9 bp, Unknown
  misc_feature (1)..( 9): Result.005 file - promoters50/1837627
aaacaaaaa

SEQ ID NO: 178345 - DNA, 9 bp, Unknown
  misc_feature (1)..( 9): Result.005 file - promoters50/1837627
aaacaaaaa

SEQ ID NO: 178346 - DNA, 9 bp, Unknown
  misc_feature (1)..( 9): Result.005 file - promoters50/1837627
ggccaaaaa

SEQ ID NO: 178347 - DNA, 8 bp, Unknown
  misc_feature (1)..( 8): Result.005 file - promoters50/1837627
ataatatt

SEQ ID NO: 178348 - DNA, 8 bp, Unknown
  misc_feature (1)..( 8): Result.005 file - promoters50/1837627
ataaaatt

SEQ ID NO: 178349 - DNA, 8 bp, Unknown
  misc_feature (1)..( 8): Result.005 file - promoters50/1837627
ctaaaata

SEQ ID NO: 178350 - DNA, 7 bp, Unknown
  misc_feature (1)..( 7): Result.005 file - promoters50/1920394
aatgtta

SEQ ID NO: 178351 - DNA, 7 bp, Unknown
  misc_feature (1)..( 7): Result.005 file - promoters50/1920394
tatgtta

SEQ ID NO: 178352 - DNA, 7 bp, Unknown
  misc_feature (1)..( 7): Result.005 file - promoters50/1920394
aatctta

SEQ ID NO: 178353 - DNA, 10 bp, Unknown
  misc_feature (1)..( 10): Result.005 file - promoters50/1920394
gatcaatgtg

SEQ ID NO: 178354 - DNA, 10 bp, Unknown
  misc_feature (1)..( 10): Result.005 file - promoters50/1920394
ttttaatgtg

SEQ ID NO: 178355 - DNA, 10 bp, Unknown
  misc_feature (1)..( 10): Result.005 file - promoters50/1920394
ttttcatgta

SEQ ID NO: 178356 - DNA, 10 bp, Unknown
  misc_feature (1)..( 10): Result.005 file - promoters50/1920394
gttataagac

SEQ ID NO: 178357 - DNA, 10 bp, Unknown
  misc_feature (1)..( 10): Result.005 file - promoters50/1920394
gttttaatgt

SEQ ID NO: 178358 - DNA, 10 bp, Unknown
  misc_feature (1)..( 10): Result.005 file - promoters50/1920394
attttcatgt

SEQ ID NO: 178359 - DNA, 12 bp, Unknown
  misc_feature (1)..( 12): Result.005 file - promoters50/1920394
ccaagttttatt

SEQ ID NO: 178360 - DNA, 12 bp, Unknown
  misc_feature (1)..( 12): Result.005 file - promoters50/1920394
ccaatttttatt

SEQ ID NO: 178361 - DNA, 12 bp, Unknown
  misc_feature (1)..( 12): Result.005 file - promoters50/1920394
aagagttttacg

SEQ ID NO: 178362 - DNA, 11 bp, Unknown
  misc_feature (1)..( 11): Result.005 file - promoters50/1920394
agttttcgaat

SEQ ID NO: 178363 - DNA, 11 bp, Unknown
  misc_feature (1)..( 11): Result.005 file - promoters50/1920394
aatttttgaat

SEQ ID NO: 178364 - DNA, 11 bp, Unknown
  misc_feature (1)..( 11): Result.005 file - promoters50/1920394
aatttttataa

SEQ ID NO: 178365 - DNA, 8 bp, Unknown
  misc_feature (1)..( 8): Result.005 file - promoters50/1920394
ataatttc

SEQ ID NO: 178366 - DNA, 8 bp, Unknown
  misc_feature (1)..( 8): Result.005 file - promoters50/1920394
ataattaa

SEQ ID NO: 178367 - DNA, 8 bp, Unknown
  misc_feature (1)..( 8): Result.005 file - promoters50/1920394
ataagtaa

SEQ ID NO: 178368 - DNA, 7 bp, Unknown
  misc_feature (1)..( 7): Result.005 file - promoters50/1920394
ttaaaag

SEQ ID NO: 178369 - DNA, 7 bp, Unknown
  misc_feature (1)..( 7): Result.005 file - promoters50/1920394
ttaaaaa

SEQ ID NO: 178370 - DNA, 8 bp, Unknown
  misc_feature (1)..( 8): Result.005 file - promoters50/1920394
ttataaat

SEQ ID NO: 178371 - DNA, 8 bp, Unknown
  misc_feature (1)..( 8): Result.005 file - promoters50/1920394
aaactaga

SEQ ID NO: 178372 - DNA, 8 bp, Unknown
  misc_feature (1)..( 8): Result.005 file - promoters50/1920394
aaactatt

SEQ ID NO: 178373 - DNA, 8 bp, Unknown
  misc_feature (1)..( 8): Result.005 file - promoters50/1920394
taaccatt

SEQ ID NO: 178374 - DNA, 11 bp, Unknown
  misc_feature (1)..( 11): Result.005 file - promoters50/1921363
caattttctca

SEQ ID NO: 178375 - DNA, 11 bp, Unknown
  misc_feature (1)..( 11): Result.005 file - promoters50/1921363
ttcatttttca

SEQ ID NO: 178376 - DNA, 11 bp, Unknown
  misc_feature (1)..( 11): Result.005 file - promoters50/1921363
catatttttgc

SEQ ID NO: 178377 - DNA, 11 bp, Unknown
  misc_feature (1)..( 11): Result.005 file - promoters50/1921363
atagtttgtgt

SEQ ID NO: 178378 - DNA, 10 bp, Unknown
  misc_feature (1)..( 10): Result.005 file - promoters50/1921363
atttaatact

SEQ ID NO: 178379 - DNA, 10 bp, Unknown
  misc_feature (1)..( 10): Result.005 file - promoters50/1921363
tgttaatata

SEQ ID NO: 178380 - DNA, 10 bp, Unknown
  misc_feature (1)..( 10): Result.005 file - promoters50/1921363
gttttatatt

SEQ ID NO: 178381 - DNA, 10 bp, Unknown
  misc_feature (1)..( 10): Result.005 file - promoters50/1921363
tttttattga

SEQ ID NO: 178382 - DNA, 10 bp, Unknown
  misc_feature (1)..( 10): Result.005 file - promoters50/1921363
tattaaaata

SEQ ID NO: 178383 - DNA, 9 bp, Unknown
  misc_feature (1)..( 9): Result.005 file - promoters50/1921363
cggaaaata

SEQ ID NO: 178384 - DNA, 9 bp, Unknown
  misc_feature (1)..( 9): Result.005 file - promoters50/1921363
cagaaaata

SEQ ID NO: 178385 - DNA, 9 bp, Unknown
  misc_feature (1)..( 9): Result.005 file - promoters50/1921363
tagaaaagt

SEQ ID NO: 178386 - DNA, 9 bp, Unknown
  misc_feature (1)..( 9): Result.005 file - promoters50/1921363
tagaaaact

SEQ ID NO: 178387 - DNA, 13 bp, Unknown
  misc_feature (1)..( 13): Result.005 file - promoters50/1921363
tttttattgaaat

SEQ ID NO: 178388 - DNA, 13 bp, Unknown
  misc_feature (1)..( 13): Result.005 file - promoters50/1921363
aatatatagaaat

SEQ ID NO: 178389 - DNA, 13 bp, Unknown
  misc_feature (1)..( 13): Result.005 file - promoters50/1921363
tacatattaaaat

SEQ ID NO: 178390 - DNA, 13 bp, Unknown
  misc_feature (1)..( 13): Result.005 file - promoters50/1921363
tttatattgtttg

SEQ ID NO: 178391 - DNA, 10 bp, Unknown
  misc_feature (1)..( 10): Result.005 file - promoters50/1923743
tttcaaaatg

SEQ ID NO: 178392 - DNA, 10 bp, Unknown
  misc_feature (1)..( 10): Result.005 file - promoters50/1923743
attcgaaaga

SEQ ID NO: 178393 - DNA, 10 bp, Unknown
  misc_feature (1)..( 10): Result.005 file - promoters50/1923743
tttccaaaga

SEQ ID NO: 178394 - DNA, 10 bp, Unknown
  misc_feature (1)..( 10): Result.005 file - promoters50/1923743
gttcataatt

SEQ ID NO: 178395 - DNA, 10 bp, Unknown
  misc_feature (1)..( 10): Result.005 file - promoters50/1923743
ttcaataatt

SEQ ID NO: 178396 - DNA, 14 bp, Unknown
  misc_feature (1)..( 14): Result.005 file - promoters50/1957018
tttatatattttta

SEQ ID NO: 178397 - DNA, 14 bp, Unknown
  misc_feature (1)..( 14): Result.005 file - promoters50/1957018
aactaggattctta

SEQ ID NO: 178398 - DNA, 14 bp, Unknown
  misc_feature (1)..( 14): Result.005 file - promoters50/1957018
tttatatattttgt

SEQ ID NO: 178399 - DNA, 14 bp, Unknown
  misc_feature (1)..( 14): Result.005 file - promoters50/1957018
accatggatgcttt

SEQ ID NO: 178400 - DNA, 14 bp, Unknown
  misc_feature (1)..( 14): Result.005 file - promoters50/1957018
tagtaagattctag

SEQ ID NO: 178401 - DNA, 14 bp, Unknown
  misc_feature (1)..( 14): Result.005 file - promoters50/1957018
tagtaagattctag

SEQ ID NO: 178402 - DNA, 8 bp, Unknown
  misc_feature (1)..( 8): Result.005 file - promoters50/1957094
cggcaaaa

SEQ ID NO: 178403 - DNA, 8 bp, Unknown
  misc_feature (1)..( 8): Result.005 file - promoters50/1957094
cggcaaat

SEQ ID NO: 178404 - DNA, 8 bp, Unknown
  misc_feature (1)..( 8): Result.005 file - promoters50/1957094
tggcaaat

SEQ ID NO: 178405 - DNA, 9 bp, Unknown
  misc_feature (1)..( 9): Result.005 file - promoters50/1957212
tcgagaaac

SEQ ID NO: 178406 - DNA, 9 bp, Unknown
  misc_feature (1)..( 9): Result.005 file - promoters50/1957212
tggagaaag

SEQ ID NO: 178407 - DNA, 9 bp, Unknown
  misc_feature (1)..( 9): Result.005 file - promoters50/1957212
tcgtgaaca

SEQ ID NO: 178408 - DNA, 9 bp, Unknown
  misc_feature (1)..( 9): Result.005 file - promoters50/1957212
cagagactt

SEQ ID NO: 178409 - DNA, 9 bp, Unknown
  misc_feature (1)..( 9): Result.005 file - promoters50/1957212
aagagagat

SEQ ID NO: 178410 - DNA, 9 bp, Unknown
  misc_feature (1)..( 9): Result.005 file - promoters50/1957212
ctaagaaag

SEQ ID NO: 178411 - DNA, 9 bp, Unknown
  misc_feature (1)..( 9): Result.005 file - promoters50/1957212
gtaataaat

SEQ ID NO: 178412 - DNA, 10 bp, Unknown
  misc_feature (1)..( 10): Result.005 file - promoters50/1957212
ggagacagag

SEQ ID NO: 178413 - DNA, 10 bp, Unknown
  misc_feature (1)..( 10): Result.005 file - promoters50/1957212
ggaaacatat

SEQ ID NO: 178414 - DNA, 10 bp, Unknown
  misc_feature (1)..( 10): Result.005 file - promoters50/1957212
agaaagaatc

SEQ ID NO: 178415 - DNA, 10 bp, Unknown
  misc_feature (1)..( 10): Result.005 file - promoters50/1957212
agacagacag

SEQ ID NO: 178416 - DNA, 10 bp, Unknown
  misc_feature (1)..( 10): Result.005 file - promoters50/1957212
taaaacgaca

SEQ ID NO: 178417 - DNA, 10 bp, Unknown
  misc_feature (1)..( 10): Result.005 file - promoters50/1957212
gcaaccacag

SEQ ID NO: 178418 - DNA, 10 bp, Unknown
  misc_feature (1)..( 10): Result.005 file - promoters50/1957212
ccaaaaaaat

SEQ ID NO: 178419 - DNA, 9 bp, Unknown
  misc_feature (1)..( 9): Result.005 file - promoters50/1957241
caaactaaa

SEQ ID NO: 178420 - DNA, 9 bp, Unknown
  misc_feature (1)..( 9): Result.005 file - promoters50/1957241
caagctaga

SEQ ID NO: 178421 - DNA, 9 bp, Unknown
  misc_feature (1)..( 9): Result.005 file - promoters50/1957241
taaacaaaa

SEQ ID NO: 178422 - DNA, 8 bp, Unknown
  misc_feature (1)..( 8): Result.005 file - promoters50/1957241
cttacaaa

SEQ ID NO: 178423 - DNA, 8 bp, Unknown
  misc_feature (1)..( 8): Result.005 file - promoters50/1957241
cttacatt

SEQ ID NO: 178424 - DNA, 8 bp, Unknown
  misc_feature (1)..( 8): Result.005 file - promoters50/1957241
gttagaaa

SEQ ID NO: 178425 - DNA, 19 bp, Unknown
  misc_feature (1)..( 19): Result.005 file - promoters50/1957245
aaaagtagtattttcacta

SEQ ID NO: 178426 - DNA, 19 bp, Unknown
  misc_feature (1)..( 19): Result.005 file - promoters50/1957245
taagagagtatttatttct

SEQ ID NO: 178427 - DNA, 19 bp, Unknown
  misc_feature (1)..( 19): Result.005 file - promoters50/1957245
aaaggtagtttttcaaaaa

SEQ ID NO: 178428 - DNA, 19 bp, Unknown
  misc_feature (1)..( 19): Result.005 file - promoters50/1957245
cagactggtaattatctct

SEQ ID NO: 178429 - DNA, 10 bp, Unknown
  misc_feature (1)..( 10): Result.005 file - promoters50/1957245
gaaataaaat

SEQ ID NO: 178430 - DNA, 10 bp, Unknown
  misc_feature (1)..( 10): Result.005 file - promoters50/1957245
taaatgaaat

SEQ ID NO: 178431 - DNA, 10 bp, Unknown
  misc_feature (1)..( 10): Result.005 file - promoters50/1957245
aaaatggcaa

SEQ ID NO: 178432 - DNA, 10 bp, Unknown
  misc_feature (1)..( 10): Result.005 file - promoters50/1957245
aaaatggtta

SEQ ID NO: 178433 - DNA, 11 bp, Unknown
  misc_feature (1)..( 11): Result.005 file - promoters50/1957245
agagaaacact

SEQ ID NO: 178434 - DNA, 11 bp, Unknown
  misc_feature (1)..( 11): Result.005 file - promoters50/1957245
tcagaaacaga

SEQ ID NO: 178435 - DNA, 11 bp, Unknown
  misc_feature (1)..( 11): Result.005 file - promoters50/1957245
tcaaaaattta

SEQ ID NO: 178436 - DNA, 11 bp, Unknown
  misc_feature (1)..( 11): Result.005 file - promoters50/1957245
ataaaaataga

SEQ ID NO: 178437 - DNA, 11 bp, Unknown
  misc_feature (1)..( 11): Result.005 file - promoters50/1957245
ataaaagtagt

SEQ ID NO: 178438 - DNA, 11 bp, Unknown
  misc_feature (1)..( 11): Result.005 file - promoters50/1957245
ataaaaataga

SEQ ID NO: 178439 - DNA, 11 bp, Unknown
  misc_feature (1)..( 11): Result.005 file - promoters50/1957245
tcagaaacaga

SEQ ID NO: 178440 - DNA, 11 bp, Unknown
  misc_feature (1)..( 11): Result.005 file - promoters50/1957245
tcaaaaattta

SEQ ID NO: 178441 - DNA, 12 bp, Unknown
  misc_feature (1)..( 12): Result.005 file - promoters50/1957245
taaaagatcggt

SEQ ID NO: 178442 - DNA, 12 bp, Unknown
  misc_feature (1)..( 12): Result.005 file - promoters50/1957245
ctctagatcgat

SEQ ID NO: 178443 - DNA, 12 bp, Unknown
  misc_feature (1)..( 12): Result.005 file - promoters50/1957245
acgcagatagat

SEQ ID NO: 178444 - DNA, 12 bp, Unknown
  misc_feature (1)..( 12): Result.005 file - promoters50/1957245
acgcacatagaa

SEQ ID NO: 178445 - DNA, 7 bp, Unknown
  misc_feature (1)..( 7): Result.005 file - promoters50/1957296
caagaaa

SEQ ID NO: 178446 - DNA, 7 bp, Unknown
  misc_feature (1)..( 7): Result.005 file - promoters50/1957296
aaagaaa

SEQ ID NO: 178447 - DNA, 7 bp, Unknown
  misc_feature (1)..( 7): Result.005 file - promoters50/1957296
aaaggaa

SEQ ID NO: 178448 - DNA, 8 bp, Unknown
  misc_feature (1)..( 8): Result.005 file - promoters50/1957303
aaacgaaa

SEQ ID NO: 178449 - DNA, 8 bp, Unknown
  misc_feature (1)..( 8): Result.005 file - promoters50/1957303
aaacgact

SEQ ID NO: 178450 - DNA, 8 bp, Unknown
  misc_feature (1)..( 8): Result.005 file - promoters50/1957303
aaaagaaa

SEQ ID NO: 178451 - DNA, 8 bp, Unknown
  misc_feature (1)..( 8): Result.005 file - promoters50/1957303
gaagaaag

SEQ ID NO: 178452 - DNA, 8 bp, Unknown
  misc_feature (1)..( 8): Result.005 file - promoters50/1957303
ttagaaag

SEQ ID NO: 178453 - DNA, 8 bp, Unknown
  misc_feature (1)..( 8): Result.005 file - promoters50/1957303
gaagaaaa

SEQ ID NO: 178454 - DNA, 14 bp, Unknown
  misc_feature (1)..( 14): Result.005 file - promoters50/1957303
agaagcaaatcgaa

SEQ ID NO: 178455 - DNA, 14 bp, Unknown
  misc_feature (1)..( 14): Result.005 file - promoters50/1957303
ttataaaaattgaa

SEQ ID NO: 178456 - DNA, 14 bp, Unknown
  misc_feature (1)..( 14): Result.005 file - promoters50/1957303
agaagaaaatcccg

SEQ ID NO: 178457 - DNA, 8 bp, Unknown
  misc_feature (1)..( 8): Result.005 file - promoters50/1957303
ttttaaag

SEQ ID NO: 178458 - DNA, 8 bp, Unknown
  misc_feature (1)..( 8): Result.005 file - promoters50/1957303
ctttaaaa

SEQ ID NO: 178459 - DNA, 8 bp, Unknown
  misc_feature (1)..( 8): Result.005 file - promoters50/1957303
atttgaag

SEQ ID NO: 178460 - DNA, 8 bp, Unknown
  misc_feature (1)..( 8): Result.005 file - promoters50/1957303
agcaaatc

SEQ ID NO: 178461 - DNA, 8 bp, Unknown
  misc_feature (1)..( 8): Result.005 file - promoters50/1957303
accaaatc

SEQ ID NO: 178462 - DNA, 8 bp, Unknown
  misc_feature (1)..( 8): Result.005 file - promoters50/1957303
agcgaatg

SEQ ID NO: 178463 - DNA, 10 bp, Unknown
  misc_feature (1)..( 10): Result.005 file - promoters50/1957303
gaagaaaaaa

SEQ ID NO: 178464 - DNA, 10 bp, Unknown
  misc_feature (1)..( 10): Result.005 file - promoters50/1957303
gaacaaaacc

SEQ ID NO: 178465 - DNA, 10 bp, Unknown
  misc_feature (1)..( 10): Result.005 file - promoters50/1957303
gaaaaaaaaa

SEQ ID NO: 178466 - DNA, 11 bp, Unknown
  misc_feature (1)..( 11): Result.005 file - promoters50/1959878
tctaattggat

SEQ ID NO: 178467 - DNA, 11 bp, Unknown
  misc_feature (1)..( 11): Result.005 file - promoters50/1959878
tttaaatgggc

SEQ ID NO: 178468 - DNA, 11 bp, Unknown
  misc_feature (1)..( 11): Result.005 file - promoters50/1959878
gacaatttgat

SEQ ID NO: 178469 - DNA, 11 bp, Unknown
  misc_feature (1)..( 11): Result.005 file - promoters50/1959878
actaattatcc

SEQ ID NO: 178470 - DNA, 11 bp, Unknown
  misc_feature (1)..( 11): Result.005 file - promoters50/1959878
tttcatttcta

SEQ ID NO: 178471 - DNA, 9 bp, Unknown
  misc_feature (1)..( 9): Result.005 file - promoters50/1959920
gcatctctt

SEQ ID NO: 178472 - DNA, 9 bp, Unknown
  misc_feature (1)..( 9): Result.005 file - promoters50/1959920
ccatttctt

SEQ ID NO: 178473 - DNA, 9 bp, Unknown
  misc_feature (1)..( 9): Result.005 file - promoters50/1959920
gcatccctt

SEQ ID NO: 178474 - DNA, 10 bp, Unknown
  misc_feature (1)..( 10): Result.005 file - promoters50/1959920
gatttgggat

SEQ ID NO: 178475 - DNA, 10 bp, Unknown
  misc_feature (1)..( 10): Result.005 file - promoters50/1959920
tctttaggac

SEQ ID NO: 178476 - DNA, 10 bp, Unknown
  misc_feature (1)..( 10): Result.005 file - promoters50/1959920
gatttgtgat

SEQ ID NO: 178477 - DNA, 8 bp, Unknown
  misc_feature (1)..( 8): Result.005 file - promoters50/1959927
aaagattc

SEQ ID NO: 178478 - DNA, 8 bp, Unknown
  misc_feature (1)..( 8): Result.005 file - promoters50/1959927
aaatattt

SEQ ID NO: 178479 - DNA, 8 bp, Unknown
  misc_feature (1)..( 8): Result.005 file - promoters50/1959927
caattttt

SEQ ID NO: 178480 - DNA, 14 bp, Unknown
  misc_feature (1)..( 14): Result.005 file - promoters50/1959965
atttatacatataa

SEQ ID NO: 178481 - DNA, 14 bp, Unknown
  misc_feature (1)..( 14): Result.005 file - promoters50/1959965
caaacttcatctaa

SEQ ID NO: 178482 - DNA, 14 bp, Unknown
  misc_feature (1)..( 14): Result.005 file - promoters50/1959965
aaaagttcatctgt

SEQ ID NO: 178483 - DNA, 14 bp, Unknown
  misc_feature (1)..( 14): Result.005 file - promoters50/1959965
aaaagttttattct

SEQ ID NO: 178484 - DNA, 9 bp, Unknown
  misc_feature (1)..( 9): Result.005 file - promoters50/1959965
tttcatata

SEQ ID NO: 178485 - DNA, 9 bp, Unknown
  misc_feature (1)..( 9): Result.005 file - promoters50/1959965
tttcatttt

SEQ ID NO: 178486 - DNA, 9 bp, Unknown
  misc_feature (1)..( 9): Result.005 file - promoters50/1959965
tttcttata

SEQ ID NO: 178487 - DNA, 7 bp, Unknown
  misc_feature (1)..( 7): Result.005 file - promoters50/1959965
ccatttt

SEQ ID NO: 178488 - DNA, 7 bp, Unknown
  misc_feature (1)..( 7): Result.005 file - promoters50/1959965
acatttt

SEQ ID NO: 178489 - DNA, 7 bp, Unknown
  misc_feature (1)..( 7): Result.005 file - promoters50/1959965
ccatttg

SEQ ID NO: 178490 - DNA, 10 bp, Unknown
  misc_feature (1)..( 10): Result.005 file - promoters50/1959965
ttatatatca

SEQ ID NO: 178491 - DNA, 10 bp, Unknown
  misc_feature (1)..( 10): Result.005 file - promoters50/1959965
ttaaatattt

SEQ ID NO: 178492 - DNA, 10 bp, Unknown
  misc_feature (1)..( 10): Result.005 file - promoters50/1959965
tacaattttt

SEQ ID NO: 178493 - DNA, 8 bp, Unknown
  misc_feature (1)..( 8): Result.005 file - promoters50/1959965
attgtttt

SEQ ID NO: 178494 - DNA, 8 bp, Unknown
  misc_feature (1)..( 8): Result.005 file - promoters50/1959965
attttttt

SEQ ID NO: 178495 - DNA, 8 bp, Unknown
  misc_feature (1)..( 8): Result.005 file - promoters50/1959965
ctttctta

SEQ ID NO: 178496 - DNA, 13 bp, Unknown
  misc_feature (1)..( 13): Result.005 file - promoters50/1959965
ataatttaatcac

SEQ ID NO: 178497 - DNA, 13 bp, Unknown
  misc_feature (1)..( 13): Result.005 file - promoters50/1959965
agttattaatcac

SEQ ID NO: 178498 - DNA, 13 bp, Unknown
  misc_feature (1)..( 13): Result.005 file - promoters50/1959965
agtgattcatctt

SEQ ID NO: 178499 - DNA, 9 bp, Unknown
  misc_feature (1)..( 9): Result.005 file - promoters50/1959965
actatgaaa

SEQ ID NO: 178500 - DNA, 9 bp, Unknown
  misc_feature (1)..( 9): Result.005 file - promoters50/1959965
tttattaaa

SEQ ID NO: 178501 - DNA, 9 bp, Unknown
  misc_feature (1)..( 9): Result.005 file - promoters50/1959965
ttttttaaa

SEQ ID NO: 178502 - DNA, 13 bp, Unknown
  misc_feature (1)..( 13): Result.005 file - promoters50/1974123
ttatcatgcaaaa

SEQ ID NO: 178503 - DNA, 13 bp, Unknown
  misc_feature (1)..( 13): Result.005 file - promoters50/1974123
ttatcaaaccaat

SEQ ID NO: 178504 - DNA, 13 bp, Unknown
  misc_feature (1)..( 13): Result.005 file - promoters50/1974123
ctatcaaacaaat

SEQ ID NO: 178505 - DNA, 11 bp, Unknown
  misc_feature (1)..( 11): Result.005 file - promoters50/1974123
aattattttgt

SEQ ID NO: 178506 - DNA, 11 bp, Unknown
  misc_feature (1)..( 11): Result.005 file - promoters50/1974123
aatcattttgt

SEQ ID NO: 178507 - DNA, 11 bp, Unknown
  misc_feature (1)..( 11): Result.005 file - promoters50/1974123
atttatgttgt

SEQ ID NO: 178508 - DNA, 9 bp, Unknown
  misc_feature (1)..( 9): Result.005 file - promoters50/1974123
taaaactaa

SEQ ID NO: 178509 - DNA, 9 bp, Unknown
  misc_feature (1)..( 9): Result.005 file - promoters50/1974123
taaaacacc

SEQ ID NO: 178510 - DNA, 9 bp, Unknown
  misc_feature (1)..( 9): Result.005 file - promoters50/1974123
caaaatacc

SEQ ID NO: 178511 - DNA, 12 bp, Unknown
  misc_feature (1)..( 12): Result.005 file - promoters50/1974123
aaaaaaaacatt

SEQ ID NO: 178512 - DNA, 12 bp, Unknown
  misc_feature (1)..( 12): Result.005 file - promoters50/1974123
aaagaaaataga

SEQ ID NO: 178513 - DNA, 12 bp, Unknown
  misc_feature (1)..( 12): Result.005 file - promoters50/1974123
attgaaattaga

SEQ ID NO: 178514 - DNA, 8 bp, Unknown
  misc_feature (1)..( 8): Result.005 file - promoters50/1974123
tttataaa

SEQ ID NO: 178515 - DNA, 8 bp, Unknown
  misc_feature (1)..( 8): Result.005 file - promoters50/1974123
tttctaac

SEQ ID NO: 178516 - DNA, 8 bp, Unknown
  misc_feature (1)..( 8): Result.005 file - promoters50/1974123
tatataaa

SEQ ID NO: 178517 - DNA, 9 bp, Unknown
  misc_feature (1)..( 9): Result.005 file - promoters50/1974123
ccgattaga

SEQ ID NO: 178518 - DNA, 9 bp, Unknown
  misc_feature (1)..( 9): Result.005 file - promoters50/1974123
gaaattaga

SEQ ID NO: 178519 - DNA, 9 bp, Unknown
  misc_feature (1)..( 9): Result.005 file - promoters50/1974123
gaaaataga

SEQ ID NO: 178520 - DNA, 13 bp, Unknown
  misc_feature (1)..( 13): Result.005 file - promoters50/1974282
tgaacttagtctg

SEQ ID NO: 178521 - DNA, 13 bp, Unknown
  misc_feature (1)..( 13): Result.005 file - promoters50/1974282
tttacttaggaaa

SEQ ID NO: 178522 - DNA, 13 bp, Unknown
  misc_feature (1)..( 13): Result.005 file - promoters50/1974282
attactttggatt

SEQ ID NO: 178523 - DNA, 13 bp, Unknown
  misc_feature (1)..( 13): Result.005 file - promoters50/1974282
atagagttggata

SEQ ID NO: 178524 - DNA, 13 bp, Unknown
  misc_feature (1)..( 13): Result.005 file - promoters50/1974282
aattttttgaata

SEQ ID NO: 178525 - DNA, 13 bp, Unknown
  misc_feature (1)..( 13): Result.005 file - promoters50/1974282
attactctcattc

SEQ ID NO: 178526 - DNA, 13 bp, Unknown
  misc_feature (1)..( 13): Result.005 file - promoters50/1974282
attactgtataat

SEQ ID NO: 178527 - DNA, 15 bp, Unknown
  misc_feature (1)..( 15): Result.005 file - promoters50/1974282
catgttcgaacatga

SEQ ID NO: 178528 - DNA, 15 bp, Unknown
  misc_feature (1)..( 15): Result.005 file - promoters50/1974282
ccttttcgtacatca

SEQ ID NO: 178529 - DNA, 15 bp, Unknown
  misc_feature (1)..( 15): Result.005 file - promoters50/1974282
cctattacaacatga

SEQ ID NO: 178530 - DNA, 15 bp, Unknown
  misc_feature (1)..( 15): Result.005 file - promoters50/1974282
cctttttgtatcaag

SEQ ID NO: 178531 - DNA, 15 bp, Unknown
  misc_feature (1)..( 15): Result.005 file - promoters50/1974282
aacagttgtataatt

SEQ ID NO: 178532 - DNA, 15 bp, Unknown
  misc_feature (1)..( 15): Result.005 file - promoters50/1974282
tctttttgatatgat

SEQ ID NO: 178533 - DNA, 14 bp, Unknown
  misc_feature (1)..( 14): Result.005 file - promoters50/1974282
caaaaaacttccaa

SEQ ID NO: 178534 - DNA, 14 bp, Unknown
  misc_feature (1)..( 14): Result.005 file - promoters50/1974282
ctaaaaacgaatta

SEQ ID NO: 178535 - DNA, 14 bp, Unknown
  misc_feature (1)..( 14): Result.005 file - promoters50/1974282
ataaaagttctaaa

SEQ ID NO: 178536 - DNA, 14 bp, Unknown
  misc_feature (1)..( 14): Result.005 file - promoters50/1974282
ctaacaacttaatt

SEQ ID NO: 178537 - DNA, 14 bp, Unknown
  misc_feature (1)..( 14): Result.005 file - promoters50/1974282
ttaaaagagaaggt

SEQ ID NO: 178538 - DNA, 14 bp, Unknown
  misc_feature (1)..( 14): Result.005 file - promoters50/1974282
ttcaaaatttataa

SEQ ID NO: 178539 - DNA, 13 bp, Unknown
  misc_feature (1)..( 13): Result.005 file - promoters50/1974501
ttaatgtatttgt

SEQ ID NO: 178540 - DNA, 13 bp, Unknown
  misc_feature (1)..( 13): Result.005 file - promoters50/1974501
cttatgtctttcc

SEQ ID NO: 178541 - DNA, 13 bp, Unknown
  misc_feature (1)..( 13): Result.005 file - promoters50/1974501
aaaagatatttgt

SEQ ID NO: 178542 - DNA, 13 bp, Unknown
  misc_feature (1)..( 13): Result.005 file - promoters50/1974501
taaaggtatttaa

SEQ ID NO: 178543 - DNA, 13 bp, Unknown
  misc_feature (1)..( 13): Result.005 file - promoters50/1974501
attatgtcatttt

SEQ ID NO: 178544 - DNA, 13 bp, Unknown
  misc_feature (1)..( 13): Result.005 file - promoters50/1974501
attgtgtagttca

SEQ ID NO: 178545 - DNA, 16 bp, Unknown
  misc_feature (1)..( 16): Result.005 file - promoters50/1974501
tctatgattatatttt

SEQ ID NO: 178546 - DNA, 16 bp, Unknown
  misc_feature (1)..( 16): Result.005 file - promoters50/1974501
agatttcaaataattt

SEQ ID NO: 178547 - DNA, 16 bp, Unknown
  misc_feature (1)..( 16): Result.005 file - promoters50/1974501
aaaaaaaaaaaaattt

SEQ ID NO: 178548 - DNA, 16 bp, Unknown
  misc_feature (1)..( 16): Result.005 file - promoters50/1974501
aaaaataaaataatac

SEQ ID NO: 178549 - DNA, 16 bp, Unknown
  misc_feature (1)..( 16): Result.005 file - promoters50/1974501
taaagttatataatca

SEQ ID NO: 178550 - DNA, 11 bp, Unknown
  misc_feature (1)..( 11): Result.005 file - promoters50/1974501
taataacatat

SEQ ID NO: 178551 - DNA, 11 bp, Unknown
  misc_feature (1)..( 11): Result.005 file - promoters50/1974501
taatcacatag

SEQ ID NO: 178552 - DNA, 11 bp, Unknown
  misc_feature (1)..( 11): Result.005 file - promoters50/1974501
aaataaaataa

SEQ ID NO: 178553 - DNA, 11 bp, Unknown
  misc_feature (1)..( 11): Result.005 file - promoters50/1974501
taaaaaaaaaa

SEQ ID NO: 178554 - DNA, 11 bp, Unknown
  misc_feature (1)..( 11): Result.005 file - promoters50/1974501
atttcaaataa

SEQ ID NO: 178555 - DNA, 16 bp, Unknown
  misc_feature (1)..( 16): Result.005 file - promoters50/1974501
caatataaatgtattg

SEQ ID NO: 178556 - DNA, 16 bp, Unknown
  misc_feature (1)..( 16): Result.005 file - promoters50/1974501
aaatacaaatttattg

SEQ ID NO: 178557 - DNA, 16 bp, Unknown
  misc_feature (1)..( 16): Result.005 file - promoters50/1974501
taataaaaactaatga

SEQ ID NO: 178558 - DNA, 16 bp, Unknown
  misc_feature (1)..( 16): Result.005 file - promoters50/1974501
atgaaatcatttatta

SEQ ID NO: 178559 - DNA, 16 bp, Unknown
  misc_feature (1)..( 16): Result.005 file - promoters50/1974501
aaatactcaattattt

SEQ ID NO: 178560 - DNA, 8 bp, Unknown
  misc_feature (1)..( 8): Result.005 file - promoters50/1974737
tataaaaa

SEQ ID NO: 178561 - DNA, 8 bp, Unknown
  misc_feature (1)..( 8): Result.005 file - promoters50/1974737
gataaaat

SEQ ID NO: 178562 - DNA, 8 bp, Unknown
  misc_feature (1)..( 8): Result.005 file - promoters50/1974737
tataaaaa

SEQ ID NO: 178563 - DNA, 8 bp, Unknown
  misc_feature (1)..( 8): Result.005 file - promoters50/1974737
tataaaac

SEQ ID NO: 178564 - DNA, 8 bp, Unknown
  misc_feature (1)..( 8): Result.005 file - promoters50/1974737
cataaaat

SEQ ID NO: 178565 - DNA, 8 bp, Unknown
  misc_feature (1)..( 8): Result.005 file - promoters50/1974737
tataaaac

SEQ ID NO: 178566 - DNA, 12 bp, Unknown
  misc_feature (1)..( 12): Result.005 file - promoters50/1974737
gaagagaagttt

SEQ ID NO: 178567 - DNA, 12 bp, Unknown
  misc_feature (1)..( 12): Result.005 file - promoters50/1974737
taagagaaaaga

SEQ ID NO: 178568 - DNA, 12 bp, Unknown
  misc_feature (1)..( 12): Result.005 file - promoters50/1974737
gaagagtggaaa

SEQ ID NO: 178569 - DNA, 12 bp, Unknown
  misc_feature (1)..( 12): Result.005 file - promoters50/1974737
aaagaaaaaaga

SEQ ID NO: 178570 - DNA, 12 bp, Unknown
  misc_feature (1)..( 12): Result.005 file - promoters50/1974737
taaaaaactctc

SEQ ID NO: 178571 - DNA, 12 bp, Unknown
  misc_feature (1)..( 12): Result.005 file - promoters50/1974737
atagagaaggaa

SEQ ID NO: 178572 - DNA, 9 bp, Unknown
  misc_feature (1)..( 9): Result.005 file - promoters50/1974761
aaattgaac

SEQ ID NO: 178573 - DNA, 9 bp, Unknown
  misc_feature (1)..( 9): Result.005 file - promoters50/1974761
aaatttaac

SEQ ID NO: 178574 - DNA, 9 bp, Unknown
  misc_feature (1)..( 9): Result.005 file - promoters50/1974761
taatttaaa

SEQ ID NO: 178575 - DNA, 6 bp, Unknown
  misc_feature (1)..( 6): Result.005 file - promoters50/1974761
atttaa

SEQ ID NO: 178576 - DNA, 6 bp, Unknown
  misc_feature (1)..( 6): Result.005 file - promoters50/1974761
atttaa

SEQ ID NO: 178577 - DNA, 6 bp, Unknown
  misc_feature (1)..( 6): Result.005 file - promoters50/1974761
atttaa

SEQ ID NO: 178578 - DNA, 8 bp, Unknown
  misc_feature (1)..( 8): Result.005 file - promoters50/1974761
aataaatt

SEQ ID NO: 178579 - DNA, 8 bp, Unknown
  misc_feature (1)..( 8): Result.005 file - promoters50/1974761
aataaatg

SEQ ID NO: 178580 - DNA, 8 bp, Unknown
  misc_feature (1)..( 8): Result.005 file - promoters50/1974761
tgtaaatt

SEQ ID NO: 178581 - DNA, 7 bp, Unknown
  misc_feature (1)..( 7): Result.005 file - promoters50/1974761
taaattt

SEQ ID NO: 178582 - DNA, 7 bp, Unknown
  misc_feature (1)..( 7): Result.005 file - promoters50/1974761
aaaattt

SEQ ID NO: 178583 - DNA, 7 bp, Unknown
  misc_feature (1)..( 7): Result.005 file - promoters50/1974761
taaatta

SEQ ID NO: 178584 - DNA, 14 bp, Unknown
  misc_feature (1)..( 14): Result.005 file - promoters50/1974761
ggagattgtccaca

SEQ ID NO: 178585 - DNA, 14 bp, Unknown
  misc_feature (1)..( 14): Result.005 file - promoters50/1974761
tcattttgcccaca

SEQ ID NO: 178586 - DNA, 14 bp, Unknown
  misc_feature (1)..( 14): Result.005 file - promoters50/1974761
ggagatggtctaac

SEQ ID NO: 178587 - DNA, 11 bp, Unknown
  misc_feature (1)..( 11): Result.005 file - promoters50/1974761
aaaaacataaa

SEQ ID NO: 178588 - DNA, 11 bp, Unknown
  misc_feature (1)..( 11): Result.005 file - promoters50/1974761
aaaaacataat

SEQ ID NO: 178589 - DNA, 11 bp, Unknown
  misc_feature (1)..( 11): Result.005 file - promoters50/1974761
cccaacaaaat

SEQ ID NO: 178590 - DNA, 8 bp, Unknown
  misc_feature (1)..( 8): Result.005 file - promoters50/1974761
cacaaaaa

SEQ ID NO: 178591 - DNA, 8 bp, Unknown
  misc_feature (1)..( 8): Result.005 file - promoters50/1974761
aacaaaat

SEQ ID NO: 178592 - DNA, 8 bp, Unknown
  misc_feature (1)..( 8): Result.005 file - promoters50/1974761
aacataat

SEQ ID NO: 178593 - DNA, 14 bp, Unknown
  misc_feature (1)..( 14): Result.005 file - promoters50/1975887
ttattgtaacagct

SEQ ID NO: 178594 - DNA, 14 bp, Unknown
  misc_feature (1)..( 14): Result.005 file - promoters50/1975887
tatttgtaaattgt

SEQ ID NO: 178595 - DNA, 14 bp, Unknown
  misc_feature (1)..( 14): Result.005 file - promoters50/1975887
ctattgtaattgta

SEQ ID NO: 178596 - DNA, 14 bp, Unknown
  misc_feature (1)..( 14): Result.005 file - promoters50/1975887
ttactgtaatcagt

SEQ ID NO: 178597 - DNA, 14 bp, Unknown
  misc_feature (1)..( 14): Result.005 file - promoters50/1975887
tgattgtaatctta

SEQ ID NO: 178598 - DNA, 14 bp, Unknown
  misc_feature (1)..( 14): Result.005 file - promoters50/1975887
attttgaaaaatgt

SEQ ID NO: 178599 - DNA, 14 bp, Unknown
  misc_feature (1)..( 14): Result.005 file - promoters50/1975887
agaatgtaaaagag

SEQ ID NO: 178600 - DNA, 16 bp, Unknown
  misc_feature (1)..( 16): Result.005 file - promoters50/1975887
tttgtaaattgtaatt

SEQ ID NO: 178601 - DNA, 16 bp, Unknown
  misc_feature (1)..( 16): Result.005 file - promoters50/1975887
tattgtaattgtaaaa

SEQ ID NO: 178602 - DNA, 16 bp, Unknown
  misc_feature (1)..( 16): Result.005 file - promoters50/1975887
attgcttactgtaatc

SEQ ID NO: 178603 - DNA, 16 bp, Unknown
  misc_feature (1)..( 16): Result.005 file - promoters50/1975887
gatcttgattgtaatc

SEQ ID NO: 178604 - DNA, 16 bp, Unknown
  misc_feature (1)..( 16): Result.005 file - promoters50/1975887
tttgaaaaatgttgtg

SEQ ID NO: 178605 - DNA, 16 bp, Unknown
  misc_feature (1)..( 16): Result.005 file - promoters50/1975887
ccacgagaatgtaaaa

SEQ ID NO: 178606 - DNA, 9 bp, Unknown
  misc_feature (1)..( 9): Result.005 file - promoters50/1975895
aaatacaat

SEQ ID NO: 178607 - DNA, 9 bp, Unknown
  misc_feature (1)..( 9): Result.005 file - promoters50/1975895
caataaaat

SEQ ID NO: 178608 - DNA, 9 bp, Unknown
  misc_feature (1)..( 9): Result.005 file - promoters50/1975895
aaaaacatt

SEQ ID NO: 178609 - DNA, 9 bp, Unknown
  misc_feature (1)..( 9): Result.005 file - promoters50/1975895
ttatataat

SEQ ID NO: 178610 - DNA, 9 bp, Unknown
  misc_feature (1)..( 9): Result.005 file - promoters50/1975895
caataacaa

SEQ ID NO: 178611 - DNA, 9 bp, Unknown
  misc_feature (1)..( 9): Result.005 file - promoters50/1975895
taataaaca

SEQ ID NO: 178612 - DNA, 13 bp, Unknown
  misc_feature (1)..( 13): Result.005 file - promoters50/1975940
catataaatgaaa

SEQ ID NO: 178613 - DNA, 13 bp, Unknown
  misc_feature (1)..( 13): Result.005 file - promoters50/1975940
catttaaaagaat

SEQ ID NO: 178614 - DNA, 13 bp, Unknown
  misc_feature (1)..( 13): Result.005 file - promoters50/1975940
agtgtaattgaaa

SEQ ID NO: 178615 - DNA, 13 bp, Unknown
  misc_feature (1)..( 13): Result.005 file - promoters50/1975940
ttattaaaatgca

SEQ ID NO: 178616 - DNA, 13 bp, Unknown
  misc_feature (1)..( 13): Result.005 file - promoters50/1975940
gatttaatttaat

SEQ ID NO: 178617 - DNA, 13 bp, Unknown
  misc_feature (1)..( 13): Result.005 file - promoters50/1975940
tcttttatttcct

SEQ ID NO: 178618 - DNA, 11 bp, Unknown
  misc_feature (1)..( 11): Result.005 file - promoters50/1975940
gtccaatagaa

SEQ ID NO: 178619 - DNA, 11 bp, Unknown
  misc_feature (1)..( 11): Result.005 file - promoters50/1975940
taaaaatagag

SEQ ID NO: 178620 - DNA, 11 bp, Unknown
  misc_feature (1)..( 11): Result.005 file - promoters50/1975940
acataaaagca

SEQ ID NO: 178621 - DNA, 11 bp, Unknown
  misc_feature (1)..( 11): Result.005 file - promoters50/1975940
acacaaaagaa

SEQ ID NO: 178622 - DNA, 11 bp, Unknown
  misc_feature (1)..( 11): Result.005 file - promoters50/1975940
tcataaaccaa

SEQ ID NO: 178623 - DNA, 11 bp, Unknown
  misc_feature (1)..( 11): Result.005 file - promoters50/1975940
acagaaaaaaa

SEQ ID NO: 178624 - DNA, 12 bp, Unknown
  misc_feature (1)..( 12): Result.005 file - promoters50/1975940
attgagtcattc

SEQ ID NO: 178625 - DNA, 12 bp, Unknown
  misc_feature (1)..( 12): Result.005 file - promoters50/1975940
cttgattcactt

SEQ ID NO: 178626 - DNA, 12 bp, Unknown
  misc_feature (1)..( 12): Result.005 file - promoters50/1975940
tttgagttctct

SEQ ID NO: 178627 - DNA, 12 bp, Unknown
  misc_feature (1)..( 12): Result.005 file - promoters50/1975940
tgtgatttactt

SEQ ID NO: 178628 - DNA, 12 bp, Unknown
  misc_feature (1)..( 12): Result.005 file - promoters50/1975940
ttttcttaaatt

SEQ ID NO: 178629 - DNA, 12 bp, Unknown
  misc_feature (1)..( 12): Result.005 file - promoters50/1975940
tgtaattgacaa

SEQ ID NO: 178630 - DNA, 13 bp, Unknown
  misc_feature (1)..( 13): Result.005 file - promoters50/1975940
gagtcttgtgagt

SEQ ID NO: 178631 - DNA, 13 bp, Unknown
  misc_feature (1)..( 13): Result.005 file - promoters50/1975940
taaacttgtgttt

SEQ ID NO: 178632 - DNA, 13 bp, Unknown
  misc_feature (1)..( 13): Result.005 file - promoters50/1975940
cccctttgagagg

SEQ ID NO: 178633 - DNA, 13 bp, Unknown
  misc_feature (1)..( 13): Result.005 file - promoters50/1975940
taaaattgtaagg

SEQ ID NO: 178634 - DNA, 13 bp, Unknown
  misc_feature (1)..( 13): Result.005 file - promoters50/1975940
cgaaattttaaat

SEQ ID NO: 178635 - DNA, 13 bp, Unknown
  misc_feature (1)..( 13): Result.005 file - promoters50/1975940
ttaatatttaaga

SEQ ID NO: 178636 - DNA, 12 bp, Unknown
  misc_feature (1)..( 12): Result.005 file - promoters50/1975940
agtaatatttga

SEQ ID NO: 178637 - DNA, 12 bp, Unknown
  misc_feature (1)..( 12): Result.005 file - promoters50/1975940
cttaaaattgag

SEQ ID NO: 178638 - DNA, 12 bp, Unknown
  misc_feature (1)..( 12): Result.005 file - promoters50/1975940
attaagattttt

SEQ ID NO: 178639 - DNA, 12 bp, Unknown
  misc_feature (1)..( 12): Result.005 file - promoters50/1975940
tcgttgattttg

SEQ ID NO: 178640 - DNA, 12 bp, Unknown
  misc_feature (1)..( 12): Result.005 file - promoters50/1975940
tctaaaaattca

SEQ ID NO: 178641 - DNA, 12 bp, Unknown
  misc_feature (1)..( 12): Result.005 file - promoters50/1975940
gagagaattttt

SEQ ID NO: 178642 - DNA, 12 bp, Unknown
  misc_feature (1)..( 12): Result.005 file - promoters50/1975940
gtacaatttggt

SEQ ID NO: 178643 - DNA, 12 bp, Unknown
  misc_feature (1)..( 12): Result.005 file - promoters50/1975940
ttttaatttgtt

SEQ ID NO: 178644 - DNA, 12 bp, Unknown
  misc_feature (1)..( 12): Result.005 file - promoters50/1975940
gaagaattagtt

SEQ ID NO: 178645 - DNA, 12 bp, Unknown
  misc_feature (1)..( 12): Result.005 file - promoters50/1975940
ttaatattagtt

SEQ ID NO: 178646 - DNA, 12 bp, Unknown
  misc_feature (1)..( 12): Result.005 file - promoters50/1975940
tttttatttcat

SEQ ID NO: 178647 - DNA, 12 bp, Unknown
  misc_feature (1)..( 12): Result.005 file - promoters50/1975940
agagaatttttg

SEQ ID NO: 178648 - DNA, 13 bp, Unknown
  misc_feature (1)..( 13): Result.005 file - promoters50/1975940
gatgttgaagtct

SEQ ID NO: 178649 - DNA, 13 bp, Unknown
  misc_feature (1)..( 13): Result.005 file - promoters50/1975940
gattttgactatg

SEQ ID NO: 178650 - DNA, 13 bp, Unknown
  misc_feature (1)..( 13): Result.005 file - promoters50/1975940
gattttttatttt

SEQ ID NO: 178651 - DNA, 13 bp, Unknown
  misc_feature (1)..( 13): Result.005 file - promoters50/1975940
tatttttttcttc

SEQ ID NO: 178652 - DNA, 13 bp, Unknown
  misc_feature (1)..( 13): Result.005 file - promoters50/1975940
aattttttaattt

SEQ ID NO: 178653 - DNA, 13 bp, Unknown
  misc_feature (1)..( 13): Result.005 file - promoters50/1975940
aatttttgtagac

SEQ ID NO: 178654 - DNA, 16 bp, Unknown
  misc_feature (1)..( 16): Result.005 file - promoters50/1975940
gtacaaaattgagcaa

SEQ ID NO: 178655 - DNA, 16 bp, Unknown
  misc_feature (1)..( 16): Result.005 file - promoters50/1975940
atacaaaattgataaa

SEQ ID NO: 178656 - DNA, 16 bp, Unknown
  misc_feature (1)..( 16): Result.005 file - promoters50/1975940
tataaaaatttagaat

SEQ ID NO: 178657 - DNA, 16 bp, Unknown
  misc_feature (1)..( 16): Result.005 file - promoters50/1975940
tgattaaattgaacaa

SEQ ID NO: 178658 - DNA, 16 bp, Unknown
  misc_feature (1)..( 16): Result.005 file - promoters50/1975940
ataacaaattttcttt

SEQ ID NO: 178659 - DNA, 16 bp, Unknown
  misc_feature (1)..( 16): Result.005 file - promoters50/1975940
ataaaaaattacggta

SEQ ID NO: 178660 - DNA, 7 bp, Unknown
  misc_feature (1)..( 7): Result.005 file - promoters50/1975956
taataat

SEQ ID NO: 178661 - DNA, 7 bp, Unknown
  misc_feature (1)..( 7): Result.005 file - promoters50/1975956
taataat

SEQ ID NO: 178662 - DNA, 7 bp, Unknown
  misc_feature (1)..( 7): Result.005 file - promoters50/1975956
taaaaat

SEQ ID NO: 178663 - DNA, 6 bp, Unknown
  misc_feature (1)..( 6): Result.005 file - promoters50/1975956
aatttt

SEQ ID NO: 178664 - DNA, 6 bp, Unknown
  misc_feature (1)..( 6): Result.005 file - promoters50/1975956
aatttt

SEQ ID NO: 178665 - DNA, 6 bp, Unknown
  misc_feature (1)..( 6): Result.005 file - promoters50/1975956
aatttt

SEQ ID NO: 178666 - DNA, 14 bp, Unknown
  misc_feature (1)..( 14): Result.005 file - promoters50/1975956
atatatatatattt

SEQ ID NO: 178667 - DNA, 14 bp, Unknown
  misc_feature (1)..( 14): Result.005 file - promoters50/1975956
ttgaatcaatattt

SEQ ID NO: 178668 - DNA, 14 bp, Unknown
  misc_feature (1)..( 14): Result.005 file - promoters50/1975956
ttgattcaaaattc

SEQ ID NO: 178669 - DNA, 8 bp, Unknown
  misc_feature (1)..( 8): Result.005 file - promoters50/1975956
tgaaaaaa

SEQ ID NO: 178670 - DNA, 8 bp, Unknown
  misc_feature (1)..( 8): Result.005 file - promoters50/1975956
ctaaaaaa

SEQ ID NO: 178671 - DNA, 8 bp, Unknown
  misc_feature (1)..( 8): Result.005 file - promoters50/1975956
tgagaaag

SEQ ID NO: 178672 - DNA, 9 bp, Unknown
  misc_feature (1)..( 9): Result.005 file - promoters50/1975956
taactttca

SEQ ID NO: 178673 - DNA, 9 bp, Unknown
  misc_feature (1)..( 9): Result.005 file - promoters50/1975956
taaatttct

SEQ ID NO: 178674 - DNA, 9 bp, Unknown
  misc_feature (1)..( 9): Result.005 file - promoters50/1975956
ggtatttct

SEQ ID NO: 178675 - DNA, 8 bp, Unknown
  misc_feature (1)..( 8): Result.005 file - promoters50/1975956
aattgtat

SEQ ID NO: 178676 - DNA, 8 bp, Unknown
  misc_feature (1)..( 8): Result.005 file - promoters50/1975956
aattatat

SEQ ID NO: 178677 - DNA, 8 bp, Unknown
  misc_feature (1)..( 8): Result.005 file - promoters50/1975956
tattatag

SEQ ID NO: 178678 - DNA, 9 bp, Unknown
  misc_feature (1)..( 9): Result.005 file - promoters50/1975989
atataattt

SEQ ID NO: 178679 - DNA, 9 bp, Unknown
  misc_feature (1)..( 9): Result.005 file - promoters50/1975989
aattaattt

SEQ ID NO: 178680 - DNA, 9 bp, Unknown
  misc_feature (1)..( 9): Result.005 file - promoters50/1975989
tcataattt

SEQ ID NO: 178681 - DNA, 9 bp, Unknown
  misc_feature (1)..( 9): Result.005 file - promoters50/1975989
tcacaatgc

SEQ ID NO: 178682 - DNA, 8 bp, Unknown
  misc_feature (1)..( 8): Result.005 file - promoters50/1975989
tttaattt

SEQ ID NO: 178683 - DNA, 8 bp, Unknown
  misc_feature (1)..( 8): Result.005 file - promoters50/1975989
tttaattt

SEQ ID NO: 178684 - DNA, 8 bp, Unknown
  misc_feature (1)..( 8): Result.005 file - promoters50/1975989
ataaattc

SEQ ID NO: 178685 - DNA, 7 bp, Unknown
  misc_feature (1)..( 7): Result.005 file - promoters50/1975989
taaatct

SEQ ID NO: 178686 - DNA, 7 bp, Unknown
  misc_feature (1)..( 7): Result.005 file - promoters50/1975989
caaatct

SEQ ID NO: 178687 - DNA, 7 bp, Unknown
  misc_feature (1)..( 7): Result.005 file - promoters50/1975989
taactct

SEQ ID NO: 178688 - DNA, 10 bp, Unknown
  misc_feature (1)..( 10): Result.005 file - promoters50/1975989
gaaaattgat

SEQ ID NO: 178689 - DNA, 10 bp, Unknown
  misc_feature (1)..( 10): Result.005 file - promoters50/1975989
taaaactgat

SEQ ID NO: 178690 - DNA, 10 bp, Unknown
  misc_feature (1)..( 10): Result.005 file - promoters50/1975989
taaaacaatt

SEQ ID NO: 178691 - DNA, 9 bp, Unknown
  misc_feature (1)..( 9): Result.005 file - promoters50/1975989
atttttttt

SEQ ID NO: 178692 - DNA, 9 bp, Unknown
  misc_feature (1)..( 9): Result.005 file - promoters50/1975989
atttttttt

SEQ ID NO: 178693 - DNA, 9 bp, Unknown
  misc_feature (1)..( 9): Result.005 file - promoters50/1975989
tttactttt

SEQ ID NO: 178694 - DNA, 8 bp, Unknown
  misc_feature (1)..( 8): Result.005 file - promoters50/1975989
tcaattta

SEQ ID NO: 178695 - DNA, 8 bp, Unknown
  misc_feature (1)..( 8): Result.005 file - promoters50/1975989
tcattttt

SEQ ID NO: 178696 - DNA, 8 bp, Unknown
  misc_feature (1)..( 8): Result.005 file - promoters50/1975989
ctattttt

SEQ ID NO: 178697 - DNA, 7 bp, Unknown
  misc_feature (1)..( 7): Result.005 file - promoters50/1975989
tataaat

SEQ ID NO: 178698 - DNA, 7 bp, Unknown
  misc_feature (1)..( 7): Result.005 file - promoters50/1975989
tataaac

SEQ ID NO: 178699 - DNA, 7 bp, Unknown
  misc_feature (1)..( 7): Result.005 file - promoters50/1975989
aataaac

SEQ ID NO: 178700 - DNA, 9 bp, Unknown
  misc_feature (1)..( 9): Result.005 file - promoters50/1976000
aaaacacga

SEQ ID NO: 178701 - DNA, 9 bp, Unknown
  misc_feature (1)..( 9): Result.005 file - promoters50/1976000
aaaacaatt

SEQ ID NO: 178702 - DNA, 9 bp, Unknown
  misc_feature (1)..( 9): Result.005 file - promoters50/1976000
caaacgatt

SEQ ID NO: 178703 - DNA, 17 bp, Unknown
  misc_feature (1)..( 17): Result.005 file - promoters50/1976004
ttatgccatgtagcttc

SEQ ID NO: 178704 - DNA, 17 bp, Unknown
  misc_feature (1)..( 17): Result.005 file - promoters50/1976004
tagacccatgttagaag

SEQ ID NO: 178705 - DNA, 17 bp, Unknown
  misc_feature (1)..( 17): Result.005 file - promoters50/1976004
ttattccatgatcttat

SEQ ID NO: 178706 - DNA, 17 bp, Unknown
  misc_feature (1)..( 17): Result.005 file - promoters50/1976004
actcaccatgtttattt

SEQ ID NO: 178707 - DNA, 17 bp, Unknown
  misc_feature (1)..( 17): Result.005 file - promoters50/1976004
acaggttatgttattta

SEQ ID NO: 178708 - DNA, 17 bp, Unknown
  misc_feature (1)..( 17): Result.005 file - promoters50/1976004
tactcatgtgtaatttg

SEQ ID NO: 178709 - DNA, 17 bp, Unknown
  misc_feature (1)..( 17): Result.005 file - promoters50/1976004
ctgcgtttgttaatttg

SEQ ID NO: 178710 - DNA, 14 bp, Unknown
  misc_feature (1)..( 14): Result.005 file - promoters50/1976004
tagaaaataaaaat

SEQ ID NO: 178711 - DNA, 14 bp, Unknown
  misc_feature (1)..( 14): Result.005 file - promoters50/1976004
attaaattaaagaa

SEQ ID NO: 178712 - DNA, 14 bp, Unknown
  misc_feature (1)..( 14): Result.005 file - promoters50/1976004
tagtaaataatatt

SEQ ID NO: 178713 - DNA, 14 bp, Unknown
  misc_feature (1)..( 14): Result.005 file - promoters50/1976004
tgcgttttatattt

SEQ ID NO: 178714 - DNA, 14 bp, Unknown
  misc_feature (1)..( 14): Result.005 file - promoters50/1976004
aaacaattaagaaa

SEQ ID NO: 178715 - DNA, 14 bp, Unknown
  misc_feature (1)..( 14): Result.005 file - promoters50/1976004
gattaattaactta

SEQ ID NO: 178716 - DNA, 14 bp, Unknown
  misc_feature (1)..( 14): Result.005 file - promoters50/1976004
aaagtttgatatat

SEQ ID NO: 178717 - DNA, 15 bp, Unknown
  misc_feature (1)..( 15): Result.005 file - promoters50/1976004
aaaatcaaaaataag

SEQ ID NO: 178718 - DNA, 15 bp, Unknown
  misc_feature (1)..( 15): Result.005 file - promoters50/1976004
agaattaaaatcaat

SEQ ID NO: 178719 - DNA, 15 bp, Unknown
  misc_feature (1)..( 15): Result.005 file - promoters50/1976004
aaaaacaattaagaa

SEQ ID NO: 178720 - DNA, 15 bp, Unknown
  misc_feature (1)..( 15): Result.005 file - promoters50/1976004
attttcaaaaaaatt

SEQ ID NO: 178721 - DNA, 16 bp, Unknown
  misc_feature (1)..( 16): Result.005 file - promoters50/1976004
tatgtcacaaaattta

SEQ ID NO: 178722 - DNA, 16 bp, Unknown
  misc_feature (1)..( 16): Result.005 file - promoters50/1976004
atttcgcaaaactatt

SEQ ID NO: 178723 - DNA, 10 bp, Unknown
  misc_feature (1)..( 10): Result.005 file - promoters50/1976004
tagaaataat

SEQ ID NO: 178724 - DNA, 10 bp, Unknown
  misc_feature (1)..( 10): Result.005 file - promoters50/1976004
aacaaataaa

SEQ ID NO: 178725 - DNA, 10 bp, Unknown
  misc_feature (1)..( 10): Result.005 file - promoters50/1976004
aagatataaa

SEQ ID NO: 178726 - DNA, 10 bp, Unknown
  misc_feature (1)..( 10): Result.005 file - promoters50/1976004
acgaattaat

SEQ ID NO: 178727 - DNA, 10 bp, Unknown
  misc_feature (1)..( 10): Result.005 file - promoters50/1976004
aagatattat

SEQ ID NO: 178728 - DNA, 10 bp, Unknown
  misc_feature (1)..( 10): Result.005 file - promoters50/1976004
aacaaatttc

SEQ ID NO: 178729 - DNA, 10 bp, Unknown
  misc_feature (1)..( 10): Result.005 file - promoters50/1976004
gaaaaataac

SEQ ID NO: 178730 - DNA, 10 bp, Unknown
  misc_feature (1)..( 10): Result.005 file - promoters50/1976004
atacagtata

SEQ ID NO: 178731 - DNA, 10 bp, Unknown
  misc_feature (1)..( 10): Result.005 file - promoters50/1976004
ataaagtttt

SEQ ID NO: 178732 - DNA, 10 bp, Unknown
  misc_feature (1)..( 10): Result.005 file - promoters50/1976004
ataaactttt

SEQ ID NO: 178733 - DNA, 10 bp, Unknown
  misc_feature (1)..( 10): Result.005 file - promoters50/1976004
ccaaaatttt

SEQ ID NO: 178734 - DNA, 10 bp, Unknown
  misc_feature (1)..( 10): Result.005 file - promoters50/1976004
aacaaatttc

SEQ ID NO: 178735 - DNA, 10 bp, Unknown
  misc_feature (1)..( 10): Result.005 file - promoters50/1976004
aacgaattaa

SEQ ID NO: 178736 - DNA, 10 bp, Unknown
  misc_feature (1)..( 10): Result.005 file - promoters50/1976004
ccataatttg

SEQ ID NO: 178737 - DNA, 18 bp, Unknown
  misc_feature (1)..( 18): Result.005 file - promoters50/1976004
tacagtatacaatgatat

SEQ ID NO: 178738 - DNA, 18 bp, Unknown
  misc_feature (1)..( 18): Result.005 file - promoters50/1976004
ttttttatacaaaataca

SEQ ID NO: 178739 - DNA, 18 bp, Unknown
  misc_feature (1)..( 18): Result.005 file - promoters50/1976004
aaaggtatacgtatttgg

SEQ ID NO: 178740 - DNA, 18 bp, Unknown
  misc_feature (1)..( 18): Result.005 file - promoters50/1976004
tgcatcataaaatgttat

SEQ ID NO: 178741 - DNA, 18 bp, Unknown
  misc_feature (1)..( 18): Result.005 file - promoters50/1976004
tttcttataaaaaaaagt

SEQ ID NO: 178742 - DNA, 18 bp, Unknown
  misc_feature (1)..( 18): Result.005 file - promoters50/1976004
aaatttacaagatataaa

SEQ ID NO: 178743 - DNA, 12 bp, Unknown
  misc_feature (1)..( 12): Result.005 file - promoters50/1976004
taaacaaaagat

SEQ ID NO: 178744 - DNA, 12 bp, Unknown
  misc_feature (1)..( 12): Result.005 file - promoters50/1976004
gtcacaaaattt

SEQ ID NO: 178745 - DNA, 11 bp, Unknown
  misc_feature (1)..( 11): Result.005 file - promoters50/1976004
taacaaacaaa

SEQ ID NO: 178746 - DNA, 12 bp, Unknown
  misc_feature (1)..( 12): Result.005 file - promoters50/1976004
taaccaaaattt

SEQ ID NO: 178747 - DNA, 12 bp, Unknown
  misc_feature (1)..( 12): Result.005 file - promoters50/1976004
ttttcaaaaaaa

SEQ ID NO: 178748 - DNA, 12 bp, Unknown
  misc_feature (1)..( 12): Result.005 file - promoters50/1976004
gtcccataattt

SEQ ID NO: 178749 - DNA, 9 bp, Unknown
  misc_feature (1)..( 9): Result.005 file - promoters50/1976004
cggcccatc

SEQ ID NO: 178750 - DNA, 9 bp, Unknown
  misc_feature (1)..( 9): Result.005 file - promoters50/1976004
aggcccata

SEQ ID NO: 178751 - DNA, 9 bp, Unknown
  misc_feature (1)..( 9): Result.005 file - promoters50/1976004
aggcccaat

SEQ ID NO: 178752 - DNA, 9 bp, Unknown
  misc_feature (1)..( 9): Result.005 file - promoters50/1976004
tggcccagt

SEQ ID NO: 178753 - DNA, 9 bp, Unknown
  misc_feature (1)..( 9): Result.005 file - promoters50/1976004
aggcccatt

SEQ ID NO: 178754 - DNA, 9 bp, Unknown
  misc_feature (1)..( 9): Result.005 file - promoters50/1976004
aagcccatt

SEQ ID NO: 178755 - DNA, 10 bp, Unknown
  misc_feature (1)..( 10): Result.005 file - promoters50/1976004
tgcaatttgt

SEQ ID NO: 178756 - DNA, 10 bp, Unknown
  misc_feature (1)..( 10): Result.005 file - promoters50/1976004
tgtaatttgt

SEQ ID NO: 178757 - DNA, 10 bp, Unknown
  misc_feature (1)..( 10): Result.005 file - promoters50/1976004
gttaatttga

SEQ ID NO: 178758 - DNA, 10 bp, Unknown
  misc_feature (1)..( 10): Result.005 file - promoters50/1976004
aattatttta

SEQ ID NO: 178759 - DNA, 10 bp, Unknown
  misc_feature (1)..( 10): Result.005 file - promoters50/1976004
tgttatttat

SEQ ID NO: 178760 - DNA, 10 bp, Unknown
  misc_feature (1)..( 10): Result.005 file - promoters50/1976004
gtttatttta

SEQ ID NO: 178761 - DNA, 9 bp, Unknown
  misc_feature (1)..( 9): Result.005 file - promoters50/1976004
ataaaaatc

SEQ ID NO: 178762 - DNA, 9 bp, Unknown
  misc_feature (1)..( 9): Result.005 file - promoters50/1976004
gtaaaaaca

SEQ ID NO: 178763 - DNA, 9 bp, Unknown
  misc_feature (1)..( 9): Result.005 file - promoters50/1976004
aaaaaaatt

SEQ ID NO: 178764 - DNA, 10 bp, Unknown
  misc_feature (1)..( 10): Result.005 file - promoters50/1976004
ttaaagaatt

SEQ ID NO: 178765 - DNA, 10 bp, Unknown
  misc_feature (1)..( 10): Result.005 file - promoters50/1976004
tcacaaaatt

SEQ ID NO: 178766 - DNA, 10 bp, Unknown
  misc_feature (1)..( 10): Result.005 file - promoters50/1976004
gtaaaacgag

SEQ ID NO: 178767 - DNA, 12 bp, Unknown
  misc_feature (1)..( 12): Result.005 file - promoters50/1976004
atcaaaaataag

SEQ ID NO: 178768 - DNA, 12 bp, Unknown
  misc_feature (1)..( 12): Result.005 file - promoters50/1976004
aagaaaaataac

SEQ ID NO: 178769 - DNA, 11 bp, Unknown
  misc_feature (1)..( 11): Result.005 file - promoters50/1976004
tcaaaaaaatt

SEQ ID NO: 178770 - DNA, 12 bp, Unknown
  misc_feature (1)..( 12): Result.005 file - promoters50/1976004
tcacaaaattta

SEQ ID NO: 178771 - DNA, 12 bp, Unknown
  misc_feature (1)..( 12): Result.005 file - promoters50/1976004
attgacaataac

SEQ ID NO: 178772 - DNA, 12 bp, Unknown
  misc_feature (1)..( 12): Result.005 file - promoters50/1976004
cttaaagatatt

SEQ ID NO: 178773 - DNA, 11 bp, Unknown
  misc_feature (1)..( 11): Result.005 file - promoters50/1976004
aatcaaataaa

SEQ ID NO: 178774 - DNA, 11 bp, Unknown
  misc_feature (1)..( 11): Result.005 file - promoters50/1976004
atttaaataat

SEQ ID NO: 178775 - DNA, 11 bp, Unknown
  misc_feature (1)..( 11): Result.005 file - promoters50/1976004
atttaaataca

SEQ ID NO: 178776 - DNA, 11 bp, Unknown
  misc_feature (1)..( 11): Result.005 file - promoters50/1976004
acttacataaa

SEQ ID NO: 178777 - DNA, 11 bp, Unknown
  misc_feature (1)..( 11): Result.005 file - promoters50/1976004
tcgtaaatata

SEQ ID NO: 178778 - DNA, 11 bp, Unknown
  misc_feature (1)..( 11): Result.005 file - promoters50/1976004
gacaacataaa

SEQ ID NO: 178779 - DNA, 11 bp, Unknown
  misc_feature (1)..( 11): Result.005 file - promoters50/1976004
atgtgattgca

SEQ ID NO: 178780 - DNA, 11 bp, Unknown
  misc_feature (1)..( 11): Result.005 file - promoters50/1976004
atgttatttat

SEQ ID NO: 178781 - DNA, 11 bp, Unknown
  misc_feature (1)..( 11): Result.005 file - promoters50/1976004
tattgattggg

SEQ ID NO: 178782 - DNA, 11 bp, Unknown
  misc_feature (1)..( 11): Result.005 file - promoters50/1976004
atgttagaagt

SEQ ID NO: 178783 - DNA, 11 bp, Unknown
  misc_feature (1)..( 11): Result.005 file - promoters50/1976004
aaattaattaa

SEQ ID NO: 178784 - DNA, 11 bp, Unknown
  misc_feature (1)..( 11): Result.005 file - promoters50/1976004
aggttattcca

SEQ ID NO: 178785 - DNA, 11 bp, Unknown
  misc_feature (1)..( 11): Result.005 file - promoters50/1976004
gtgtaatttgt

SEQ ID NO: 178786 - DNA, 11 bp, Unknown
  misc_feature (1)..( 11): Result.005 file - promoters50/1976004
tgtttatttta

SEQ ID NO: 178787 - DNA, 13 bp, Unknown
  misc_feature (1)..( 13): Result.005 file - promoters50/1976004
aatataatatata

SEQ ID NO: 178788 - DNA, 13 bp, Unknown
  misc_feature (1)..( 13): Result.005 file - promoters50/1976004
aataaaatattaa

SEQ ID NO: 178789 - DNA, 13 bp, Unknown
  misc_feature (1)..( 13): Result.005 file - promoters50/1976004
tgtctaatatcgt

SEQ ID NO: 178790 - DNA, 13 bp, Unknown
  misc_feature (1)..( 13): Result.005 file - promoters50/1976004
gataaaatcaaat

SEQ ID NO: 178791 - DNA, 13 bp, Unknown
  misc_feature (1)..( 13): Result.005 file - promoters50/1976004
aataaatacatct

SEQ ID NO: 178792 - DNA, 13 bp, Unknown
  misc_feature (1)..( 13): Result.005 file - promoters50/1976004
aacaaaaagtaaa

SEQ ID NO: 178793 - DNA, 13 bp, Unknown
  misc_feature (1)..( 13): Result.005 file - promoters50/1976004
aacataaattgtg

SEQ ID NO: 178794 - DNA, 7 bp, Unknown
  misc_feature (1)..( 7): Result.005 file - promoters50/1976011
catattc

SEQ ID NO: 178795 - DNA, 7 bp, Unknown
  misc_feature (1)..( 7): Result.005 file - promoters50/1976011
catattt

SEQ ID NO: 178796 - DNA, 8 bp, Unknown
  misc_feature (1)..( 8): Result.005 file - promoters50/1976011
tatagtta

SEQ ID NO: 178797 - DNA, 10 bp, Unknown
  misc_feature (1)..( 10): Result.005 file - promoters50/1976019
aaaaattcca

SEQ ID NO: 178798 - DNA, 10 bp, Unknown
  misc_feature (1)..( 10): Result.005 file - promoters50/1976019
aaaatttcta

SEQ ID NO: 178799 - DNA, 10 bp, Unknown
  misc_feature (1)..( 10): Result.005 file - promoters50/1976019
aaaataatat

SEQ ID NO: 178800 - DNA, 10 bp, Unknown
  misc_feature (1)..( 10): Result.005 file - promoters50/1976019
aaaaaaaagg

SEQ ID NO: 178801 - DNA, 10 bp, Unknown
  misc_feature (1)..( 10): Result.005 file - promoters50/1976019
ccaatgtcta

SEQ ID NO: 178802 - DNA, 10 bp, Unknown
  misc_feature (1)..( 10): Result.005 file - promoters50/1976019
caaatttcag

SEQ ID NO: 178803 - DNA, 12 bp, Unknown
  misc_feature (1)..( 12): Result.005 file - promoters50/1976047
aattaaaagatc

SEQ ID NO: 178804 - DNA, 12 bp, Unknown
  misc_feature (1)..( 12): Result.005 file - promoters50/1976047
ttttaaaaaatc

SEQ ID NO: 178805 - DNA, 12 bp, Unknown
  misc_feature (1)..( 12): Result.005 file - promoters50/1976047
atttaaatgggc

SEQ ID NO: 178806 - DNA, 7 bp, Unknown
  misc_feature (1)..( 7): Result.005 file - promoters50/1976047
tttctcg

SEQ ID NO: 178807 - DNA, 7 bp, Unknown
  misc_feature (1)..( 7): Result.005 file - promoters50/1976047
cttctcg

SEQ ID NO: 178808 - DNA, 7 bp, Unknown
  misc_feature (1)..( 7): Result.005 file - promoters50/1976047
tttctca

SEQ ID NO: 178809 - DNA, 9 bp, Unknown
  misc_feature (1)..( 9): Result.005 file - promoters50/1976047
gatttccgg

SEQ ID NO: 178810 - DNA, 9 bp, Unknown
  misc_feature (1)..( 9): Result.005 file - promoters50/1976047
gatttcaaa

SEQ ID NO: 178811 - DNA, 9 bp, Unknown
  misc_feature (1)..( 9): Result.005 file - promoters50/1976047
cattacaaa

SEQ ID NO: 178812 - DNA, 11 bp, Unknown
  misc_feature (1)..( 11): Result.005 file - promoters50/1976047
tcaaaaacctt

SEQ ID NO: 178813 - DNA, 11 bp, Unknown
  misc_feature (1)..( 11): Result.005 file - promoters50/1976047
tcataaagctt

SEQ ID NO: 178814 - DNA, 11 bp, Unknown
  misc_feature (1)..( 11): Result.005 file - promoters50/1976047
acataaaaatt

SEQ ID NO: 178815 - DNA, 10 bp, Unknown
  misc_feature (1)..( 10): Result.005 file - promoters50/1976047
actacataaa

SEQ ID NO: 178816 - DNA, 10 bp, Unknown
  misc_feature (1)..( 10): Result.005 file - promoters50/1976047
attacaaaaa

SEQ ID NO: 178817 - DNA, 10 bp, Unknown
  misc_feature (1)..( 10): Result.005 file - promoters50/1976047
atttcaaatt

SEQ ID NO: 178818 - DNA, 7 bp, Unknown
  misc_feature (1)..( 7): Result.005 file - promoters50/1976047
ttagttt

SEQ ID NO: 178819 - DNA, 7 bp, Unknown
  misc_feature (1)..( 7): Result.005 file - promoters50/1976047
ttaattt

SEQ ID NO: 178820 - DNA, 7 bp, Unknown
  misc_feature (1)..( 7): Result.005 file - promoters50/1976047
taaatta

SEQ ID NO: 178821 - DNA, 9 bp, Unknown
  misc_feature (1)..( 9): Result.005 file - promoters50/1976063
gatgatgct

SEQ ID NO: 178822 - DNA, 9 bp, Unknown
  misc_feature (1)..( 9): Result.005 file - promoters50/1976063
catgatgtc

SEQ ID NO: 178823 - DNA, 9 bp, Unknown
  misc_feature (1)..( 9): Result.005 file - promoters50/1976063
aatgaagct

SEQ ID NO: 178824 - DNA, 9 bp, Unknown
  misc_feature (1)..( 9): Result.005 file - promoters50/1976063
aatgaagaa

SEQ ID NO: 178825 - DNA, 7 bp, Unknown
  misc_feature (1)..( 7): Result.005 file - promoters50/1976063
attattc

SEQ ID NO: 178826 - DNA, 7 bp, Unknown
  misc_feature (1)..( 7): Result.005 file - promoters50/1976063
atttttc

SEQ ID NO: 178827 - DNA, 7 bp, Unknown
  misc_feature (1)..( 7): Result.005 file - promoters50/1976063
ttttttc

SEQ ID NO: 178828 - DNA, 13 bp, Unknown
  misc_feature (1)..( 13): Result.005 file - promoters50/1976078
tcaatgcaagtag

SEQ ID NO: 178829 - DNA, 13 bp, Unknown
  misc_feature (1)..( 13): Result.005 file - promoters50/1976078
aaaatgcattaac

SEQ ID NO: 178830 - DNA, 13 bp, Unknown
  misc_feature (1)..( 13): Result.005 file - promoters50/1976078
aaaatgaattctt

SEQ ID NO: 178831 - DNA, 13 bp, Unknown
  misc_feature (1)..( 13): Result.005 file - promoters50/1976078
tttatgaatctgc

SEQ ID NO: 178832 - DNA, 13 bp, Unknown
  misc_feature (1)..( 13): Result.005 file - promoters50/1976078
tgtataaatcatt

SEQ ID NO: 178833 - DNA, 11 bp, Unknown
  misc_feature (1)..( 11): Result.005 file - promoters50/1976078
tgtaaataatt

SEQ ID NO: 178834 - DNA, 12 bp, Unknown
  misc_feature (1)..( 12): Result.005 file - promoters50/1976078
gaataaaaacag

SEQ ID NO: 178835 - DNA, 12 bp, Unknown
  misc_feature (1)..( 12): Result.005 file - promoters50/1976078
gtttaaaaagaa

SEQ ID NO: 178836 - DNA, 12 bp, Unknown
  misc_feature (1)..( 12): Result.005 file - promoters50/1976078
ccagaaaaacag

SEQ ID NO: 178837 - DNA, 12 bp, Unknown
  misc_feature (1)..( 12): Result.005 file - promoters50/1976078
gaatgaaactag

SEQ ID NO: 178838 - DNA, 12 bp, Unknown
  misc_feature (1)..( 12): Result.005 file - promoters50/1976078
ccatgaaagtga

SEQ ID NO: 178839 - DNA, 12 bp, Unknown
  misc_feature (1)..( 12): Result.005 file - promoters50/1976078
aaatgaagaatt

SEQ ID NO: 178840 - DNA, 7 bp, Unknown
  misc_feature (1)..( 7): Result.005 file - promoters50/1976102
tttcaaa

SEQ ID NO: 178841 - DNA, 7 bp, Unknown
  misc_feature (1)..( 7): Result.005 file - promoters50/1976102
tttgaaa

SEQ ID NO: 178842 - DNA, 7 bp, Unknown
  misc_feature (1)..( 7): Result.005 file - promoters50/1976102
tttcaat

SEQ ID NO: 178843 - DNA, 10 bp, Unknown
  misc_feature (1)..( 10): Result.005 file - promoters50/1976102
tttttgctcc

SEQ ID NO: 178844 - DNA, 10 bp, Unknown
  misc_feature (1)..( 10): Result.005 file - promoters50/1976102
tttttgttcc

SEQ ID NO: 178845 - DNA, 10 bp, Unknown
  misc_feature (1)..( 10): Result.005 file - promoters50/1976102
tttgtgttgt

SEQ ID NO: 178846 - DNA, 8 bp, Unknown
  misc_feature (1)..( 8): Result.005 file - promoters50/1976107
tataattt

SEQ ID NO: 178847 - DNA, 8 bp, Unknown
  misc_feature (1)..( 8): Result.005 file - promoters50/1976107
attaattt

SEQ ID NO: 178848 - DNA, 8 bp, Unknown
  misc_feature (1)..( 8): Result.005 file - promoters50/1976107
tattatta

SEQ ID NO: 178849 - DNA, 10 bp, Unknown
  misc_feature (1)..( 10): Result.005 file - promoters50/1976107
tttaatttcc

SEQ ID NO: 178850 - DNA, 10 bp, Unknown
  misc_feature (1)..( 10): Result.005 file - promoters50/1976107
tttaatttat

SEQ ID NO: 178851 - DNA, 10 bp, Unknown
  misc_feature (1)..( 10): Result.005 file - promoters50/1976107
ctcaatctcc

SEQ ID NO: 178852 - DNA, 11 bp, Unknown
  misc_feature (1)..( 11): Result.005 file - promoters50/1976158
gaaattgattt

SEQ ID NO: 178853 - DNA, 11 bp, Unknown
  misc_feature (1)..( 11): Result.005 file - promoters50/1976158
ataatttattt

SEQ ID NO: 178854 - DNA, 11 bp, Unknown
  misc_feature (1)..( 11): Result.005 file - promoters50/1976158
catatctactc

SEQ ID NO: 178855 - DNA, 11 bp, Unknown
  misc_feature (1)..( 11): Result.005 file - promoters50/1976158
catttctacat

SEQ ID NO: 178856 - DNA, 9 bp, Unknown
  misc_feature (1)..( 9): Result.005 file - promoters50/1976158
gatttctta

SEQ ID NO: 178857 - DNA, 9 bp, Unknown
  misc_feature (1)..( 9): Result.005 file - promoters50/1976158
tttttttta

SEQ ID NO: 178858 - DNA, 9 bp, Unknown
  misc_feature (1)..( 9): Result.005 file - promoters50/1976158
catttctac

SEQ ID NO: 178859 - DNA, 9 bp, Unknown
  misc_feature (1)..( 9): Result.005 file - promoters50/1976158
catatctac

SEQ ID NO: 178860 - DNA, 13 bp, Unknown
  misc_feature (1)..( 13): Result.005 file - promoters50/1976158
atcaattttgtat

SEQ ID NO: 178861 - DNA, 13 bp, Unknown
  misc_feature (1)..( 13): Result.005 file - promoters50/1976158
aacaattttctat

SEQ ID NO: 178862 - DNA, 13 bp, Unknown
  misc_feature (1)..( 13): Result.005 file - promoters50/1976158
atcaattcgaatc

SEQ ID NO: 178863 - DNA, 13 bp, Unknown
  misc_feature (1)..( 13): Result.005 file - promoters50/1976158
tataatttttttt

SEQ ID NO: 178864 - DNA, 14 bp, Unknown
  misc_feature (1)..( 14): Result.005 file - promoters50/1976158
ttaatcaaaccaaa

SEQ ID NO: 178865 - DNA, 14 bp, Unknown
  misc_feature (1)..( 14): Result.005 file - promoters50/1976158
ttagtcaaaattct

SEQ ID NO: 178866 - DNA, 14 bp, Unknown
  misc_feature (1)..( 14): Result.005 file - promoters50/1976158
aaaatcaaaccaaa

SEQ ID NO: 178867 - DNA, 14 bp, Unknown
  misc_feature (1)..( 14): Result.005 file - promoters50/1976158
tgactcaaaagcta

SEQ ID NO: 178868 - DNA, 8 bp, Unknown
  misc_feature (1)..( 8): Result.005 file - promoters50/1976158
aaaaatta

SEQ ID NO: 178869 - DNA, 8 bp, Unknown
  misc_feature (1)..( 8): Result.005 file - promoters50/1976158
gaaaattc

SEQ ID NO: 178870 - DNA, 8 bp, Unknown
  misc_feature (1)..( 8): Result.005 file - promoters50/1976158
caaactat

SEQ ID NO: 178871 - DNA, 9 bp, Unknown
  misc_feature (1)..( 9): Result.005 file - promoters50/1976158
aaataattt

SEQ ID NO: 178872 - DNA, 9 bp, Unknown
  misc_feature (1)..( 9): Result.005 file - promoters50/1976158
attgtaatt

SEQ ID NO: 178873 - DNA, 9 bp, Unknown
  misc_feature (1)..( 9): Result.005 file - promoters50/1976158
actgtaatt

SEQ ID NO: 178874 - DNA, 9 bp, Unknown
  misc_feature (1)..( 9): Result.005 file - promoters50/1976158
attataacg

SEQ ID NO: 178875 - DNA, 9 bp, Unknown
  misc_feature (1)..( 9): Result.005 file - promoters50/1976158
cttgaaatc

SEQ ID NO: 178876 - DNA, 13 bp, Unknown
  misc_feature (1)..( 13): Result.005 file - promoters50/1976174
caaacttatccac

SEQ ID NO: 178877 - DNA, 13 bp, Unknown
  misc_feature (1)..( 13): Result.005 file - promoters50/1976174
taaacttaaactc

SEQ ID NO: 178878 - DNA, 13 bp, Unknown
  misc_feature (1)..( 13): Result.005 file - promoters50/1976174
aatacttatattc

SEQ ID NO: 178879 - DNA, 13 bp, Unknown
  misc_feature (1)..( 13): Result.005 file - promoters50/1976174
aatagttaacttt

SEQ ID NO: 178880 - DNA, 13 bp, Unknown
  misc_feature (1)..( 13): Result.005 file - promoters50/1976174
gttacttttatta

SEQ ID NO: 178881 - DNA, 13 bp, Unknown
  misc_feature (1)..( 13): Result.005 file - promoters50/1976174
tgatgtttgatta

SEQ ID NO: 178882 - DNA, 13 bp, Unknown
  misc_feature (1)..( 13): Result.005 file - promoters50/1976174
taatttaattctc

SEQ ID NO: 178883 - DNA, 13 bp, Unknown
  misc_feature (1)..( 13): Result.005 file - promoters50/1976174
ccaattatttcgt

SEQ ID NO: 178884 - DNA, 13 bp, Unknown
  misc_feature (1)..( 13): Result.005 file - promoters50/1976174
agatttaatttgt

SEQ ID NO: 178885 - DNA, 13 bp, Unknown
  misc_feature (1)..( 13): Result.005 file - promoters50/1976174
tcctttcattcct

SEQ ID NO: 178886 - DNA, 13 bp, Unknown
  misc_feature (1)..( 13): Result.005 file - promoters50/1976174
aataggaatgatt

SEQ ID NO: 178887 - DNA, 13 bp, Unknown
  misc_feature (1)..( 13): Result.005 file - promoters50/1976174
tttattatttcaa

SEQ ID NO: 178888 - DNA, 13 bp, Unknown
  misc_feature (1)..( 13): Result.005 file - promoters50/1976174
agatttatgttgt

SEQ ID NO: 178889 - DNA, 13 bp, Unknown
  misc_feature (1)..( 13): Result.005 file - promoters50/1976174
cgatgtaaaaatt

SEQ ID NO: 178890 - DNA, 17 bp, Unknown
  misc_feature (1)..( 17): Result.005 file - promoters50/1976174
actatatacaaaatctc

SEQ ID NO: 178891 - DNA, 17 bp, Unknown
  misc_feature (1)..( 17): Result.005 file - promoters50/1976174
accaataccaaaatatt

SEQ ID NO: 178892 - DNA, 17 bp, Unknown
  misc_feature (1)..( 17): Result.005 file - promoters50/1976174
acttttaacaaaacaat

SEQ ID NO: 178893 - DNA, 17 bp, Unknown
  misc_feature (1)..( 17): Result.005 file - promoters50/1976174
ctatgatttaaaatata

SEQ ID NO: 178894 - DNA, 17 bp, Unknown
  misc_feature (1)..( 17): Result.005 file - promoters50/1976174
tggtggaagaaagtatt

SEQ ID NO: 178895 - DNA, 17 bp, Unknown
  misc_feature (1)..( 17): Result.005 file - promoters50/1976174
aaaaaggataaaattag

SEQ ID NO: 178896 - DNA, 17 bp, Unknown
  misc_feature (1)..( 17): Result.005 file - promoters50/1976174
tattatttcaaatgaca

SEQ ID NO: 178897 - DNA, 11 bp, Unknown
  misc_feature (1)..( 11): Result.005 file - promoters50/1976174
ataaatacaat

SEQ ID NO: 178898 - DNA, 11 bp, Unknown
  misc_feature (1)..( 11): Result.005 file - promoters50/1976174
gtaaaaacaat

SEQ ID NO: 178899 - DNA, 11 bp, Unknown
  misc_feature (1)..( 11): Result.005 file - promoters50/1976174
atatataaaaa

SEQ ID NO: 178900 - DNA, 11 bp, Unknown
  misc_feature (1)..( 11): Result.005 file - promoters50/1976174
tgaaaaaatag

SEQ ID NO: 178901 - DNA, 11 bp, Unknown
  misc_feature (1)..( 11): Result.005 file - promoters50/1976174
gaagaaacaaa

SEQ ID NO: 178902 - DNA, 11 bp, Unknown
  misc_feature (1)..( 11): Result.005 file - promoters50/1976174
cacgaaccaat

SEQ ID NO: 178903 - DNA, 10 bp, Unknown
  misc_feature (1)..( 10): Result.005 file - promoters50/1976174
gatcttgtat

SEQ ID NO: 178904 - DNA, 10 bp, Unknown
  misc_feature (1)..( 10): Result.005 file - promoters50/1976174
gattttgttt

SEQ ID NO: 178905 - DNA, 10 bp, Unknown
  misc_feature (1)..( 10): Result.005 file - promoters50/1976174
tctcttgtaa

SEQ ID NO: 178906 - DNA, 10 bp, Unknown
  misc_feature (1)..( 10): Result.005 file - promoters50/1976174
cttcttttga

SEQ ID NO: 178907 - DNA, 10 bp, Unknown
  misc_feature (1)..( 10): Result.005 file - promoters50/1976174
atccttttgt

SEQ ID NO: 178908 - DNA, 10 bp, Unknown
  misc_feature (1)..( 10): Result.005 file - promoters50/1976174
gtttttgtct

SEQ ID NO: 178909 - DNA, 10 bp, Unknown
  misc_feature (1)..( 10): Result.005 file - promoters50/1976174
catgtttttg

SEQ ID NO: 178910 - DNA, 10 bp, Unknown
  misc_feature (1)..( 10): Result.005 file - promoters50/1976174
attgttttga

SEQ ID NO: 178911 - DNA, 11 bp, Unknown
  misc_feature (1)..( 11): Result.005 file - promoters50/1976174
gtcttttactt

SEQ ID NO: 178912 - DNA, 11 bp, Unknown
  misc_feature (1)..( 11): Result.005 file - promoters50/1976174
gtcatttaaaa

SEQ ID NO: 178913 - DNA, 11 bp, Unknown
  misc_feature (1)..( 11): Result.005 file - promoters50/1976174
aatttttactt

SEQ ID NO: 178914 - DNA, 11 bp, Unknown
  misc_feature (1)..( 11): Result.005 file - promoters50/1976174
actatttaaga

SEQ ID NO: 178915 - DNA, 11 bp, Unknown
  misc_feature (1)..( 11): Result.005 file - promoters50/1976174
atagtttacta

SEQ ID NO: 178916 - DNA, 11 bp, Unknown
  misc_feature (1)..( 11): Result.005 file - promoters50/1976174
tattcttaagc

SEQ ID NO: 178917 - DNA, 12 bp, Unknown
  misc_feature (1)..( 12): Result.005 file - promoters50/1976174
ttatataaagag

SEQ ID NO: 178918 - DNA, 12 bp, Unknown
  misc_feature (1)..( 12): Result.005 file - promoters50/1976174
tcatataagtaa

SEQ ID NO: 178919 - DNA, 12 bp, Unknown
  misc_feature (1)..( 12): Result.005 file - promoters50/1976174
ttatataaatcc

SEQ ID NO: 178920 - DNA, 12 bp, Unknown
  misc_feature (1)..( 12): Result.005 file - promoters50/1976174
taatataaaggt

SEQ ID NO: 178921 - DNA, 12 bp, Unknown
  misc_feature (1)..( 12): Result.005 file - promoters50/1976174
gcataaaagaga

SEQ ID NO: 178922 - DNA, 12 bp, Unknown
  misc_feature (1)..( 12): Result.005 file - promoters50/1976174
atttatgaatcc

SEQ ID NO: 178923 - DNA, 8 bp, Unknown
  misc_feature (1)..( 8): Result.005 file - promoters50/1976223
ctttcatt

SEQ ID NO: 178924 - DNA, 8 bp, Unknown
  misc_feature (1)..( 8): Result.005 file - promoters50/1976223
ctttcaat

SEQ ID NO: 178925 - DNA, 8 bp, Unknown
  misc_feature (1)..( 8): Result.005 file - promoters50/1976223
gtttgatt

SEQ ID NO: 178926 - DNA, 11 bp, Unknown
  misc_feature (1)..( 11): Result.005 file - promoters50/1976226
ctagatacagt

SEQ ID NO: 178927 - DNA, 11 bp, Unknown
  misc_feature (1)..( 11): Result.005 file - promoters50/1976226
acagagacatc

SEQ ID NO: 178928 - DNA, 11 bp, Unknown
  misc_feature (1)..( 11): Result.005 file - promoters50/1976226
tccgatccaga

SEQ ID NO: 178929 - DNA, 11 bp, Unknown
  misc_feature (1)..( 11): Result.005 file - promoters50/1976226
tcttataaagt

SEQ ID NO: 178930 - DNA, 11 bp, Unknown
  misc_feature (1)..( 11): Result.005 file - promoters50/1976226
attgatacaaa

SEQ ID NO: 178931 - DNA, 11 bp, Unknown
  misc_feature (1)..( 11): Result.005 file - promoters50/1976226
ctagatacaaa

SEQ ID NO: 178932 - DNA, 11 bp, Unknown
  misc_feature (1)..( 11): Result.005 file - promoters50/1976226
ttgtataaatc

SEQ ID NO: 178933 - DNA, 17 bp, Unknown
  misc_feature (1)..( 17): Result.005 file - promoters50/1976236
catcttctaaaatctta

SEQ ID NO: 178934 - DNA, 17 bp, Unknown
  misc_feature (1)..( 17): Result.005 file - promoters50/1976236
ctatttcaaaaatactt

SEQ ID NO: 178935 - DNA, 17 bp, Unknown
  misc_feature (1)..( 17): Result.005 file - promoters50/1976236
cattttctagaaataac

SEQ ID NO: 178936 - DNA, 17 bp, Unknown
  misc_feature (1)..( 17): Result.005 file - promoters50/1976236
catcttcaaaattatat

SEQ ID NO: 178937 - DNA, 17 bp, Unknown
  misc_feature (1)..( 17): Result.005 file - promoters50/1976236
ttttgctaaaaatcctt

SEQ ID NO: 178938 - DNA, 18 bp, Unknown
  misc_feature (1)..( 18): Result.005 file - promoters50/1976236
taaacgttaataataaat

SEQ ID NO: 178939 - DNA, 11 bp, Unknown
  misc_feature (1)..( 11): Result.005 file - promoters50/1976236
gattagtaaaa

SEQ ID NO: 178940 - DNA, 11 bp, Unknown
  misc_feature (1)..( 11): Result.005 file - promoters50/1976236
gattactaaca

SEQ ID NO: 178941 - DNA, 11 bp, Unknown
  misc_feature (1)..( 11): Result.005 file - promoters50/1976236
ttttagcaaat

SEQ ID NO: 178942 - DNA, 11 bp, Unknown
  misc_feature (1)..( 11): Result.005 file - promoters50/1976236
aaatacttaca

SEQ ID NO: 178943 - DNA, 11 bp, Unknown
  misc_feature (1)..( 11): Result.005 file - promoters50/1976236
attttttgcat

SEQ ID NO: 178944 - DNA, 11 bp, Unknown
  misc_feature (1)..( 11): Result.005 file - promoters50/1976236
aattttttttt

SEQ ID NO: 178945 - DNA, 9 bp, Unknown
  misc_feature (1)..( 9): Result.005 file - promoters50/1976270
aaatttttt

SEQ ID NO: 178946 - DNA, 9 bp, Unknown
  misc_feature (1)..( 9): Result.005 file - promoters50/1976270
aaacttttg

SEQ ID NO: 178947 - DNA, 9 bp, Unknown
  misc_feature (1)..( 9): Result.005 file - promoters50/1976270
ccatttttt

SEQ ID NO: 178948 - DNA, 7 bp, Unknown
  misc_feature (1)..( 7): Result.005 file - promoters50/1976270
aaaataa

SEQ ID NO: 178949 - DNA, 7 bp, Unknown
  misc_feature (1)..( 7): Result.005 file - promoters50/1976270
aaactaa

SEQ ID NO: 178950 - DNA, 7 bp, Unknown
  misc_feature (1)..( 7): Result.005 file - promoters50/1976270
aaaatat

SEQ ID NO: 178951 - DNA, 9 bp, Unknown
  misc_feature (1)..( 9): Result.005 file - promoters50/1976270
ctaataaaa

SEQ ID NO: 178952 - DNA, 9 bp, Unknown
  misc_feature (1)..( 9): Result.005 file - promoters50/1976270
ctaaaaaaa

SEQ ID NO: 178953 - DNA, 9 bp, Unknown
  misc_feature (1)..( 9): Result.005 file - promoters50/1976270
ataaaaaat

SEQ ID NO: 178954 - DNA, 7 bp, Unknown
  misc_feature (1)..( 7): Result.005 file - promoters50/1976270
aataata

SEQ ID NO: 178955 - DNA, 7 bp, Unknown
  misc_feature (1)..( 7): Result.005 file - promoters50/1976270
aataata

SEQ ID NO: 178956 - DNA, 7 bp, Unknown
  misc_feature (1)..( 7): Result.005 file - promoters50/1976270
aataatt

SEQ ID NO: 178957 - DNA, 8 bp, Unknown
  misc_feature (1)..( 8): Result.005 file - promoters50/1976270
atttattt

SEQ ID NO: 178958 - DNA, 8 bp, Unknown
  misc_feature (1)..( 8): Result.005 file - promoters50/1976270
ttttattg

SEQ ID NO: 178959 - DNA, 8 bp, Unknown
  misc_feature (1)..( 8): Result.005 file - promoters50/1976270
attttttt

SEQ ID NO: 178960 - DNA, 9 bp, Unknown
  misc_feature (1)..( 9): Result.005 file - promoters50/1976270
gattaaaat

SEQ ID NO: 178961 - DNA, 9 bp, Unknown
  misc_feature (1)..( 9): Result.005 file - promoters50/1976270
gataaaaaa

SEQ ID NO: 178962 - DNA, 9 bp, Unknown
  misc_feature (1)..( 9): Result.005 file - promoters50/1976270
tctaaaaaa

SEQ ID NO: 178963 - DNA, 9 bp, Unknown
  misc_feature (1)..( 9): Result.005 file - promoters50/1976270
ttaaaaaaa

SEQ ID NO: 178964 - DNA, 9 bp, Unknown
  misc_feature (1)..( 9): Result.005 file - promoters50/1976270
tcaaaaaaa

SEQ ID NO: 178965 - DNA, 9 bp, Unknown
  misc_feature (1)..( 9): Result.005 file - promoters50/1976270
tcaaaaata

SEQ ID NO: 178966 - DNA, 12 bp, Unknown
  misc_feature (1)..( 12): Result.005 file - promoters50/1976286
aaattttacaag

SEQ ID NO: 178967 - DNA, 12 bp, Unknown
  misc_feature (1)..( 12): Result.005 file - promoters50/1976286
aaattttcacat

SEQ ID NO: 178968 - DNA, 12 bp, Unknown
  misc_feature (1)..( 12): Result.005 file - promoters50/1976286
taattttagaag

SEQ ID NO: 178969 - DNA, 11 bp, Unknown
  misc_feature (1)..( 11): Result.005 file - promoters50/1976286
aattttacaag

SEQ ID NO: 178970 - DNA, 11 bp, Unknown
  misc_feature (1)..( 11): Result.005 file - promoters50/1976286
attttcacata

SEQ ID NO: 178971 - DNA, 11 bp, Unknown
  misc_feature (1)..( 11): Result.005 file - promoters50/1976286
aattttagaag

SEQ ID NO: 178972 - DNA, 9 bp, Unknown
  misc_feature (1)..( 9): Result.005 file - promoters50/1976286
catttttgt

SEQ ID NO: 178973 - DNA, 9 bp, Unknown
  misc_feature (1)..( 9): Result.005 file - promoters50/1976286
tattcttgt

SEQ ID NO: 178974 - DNA, 9 bp, Unknown
  misc_feature (1)..( 9): Result.005 file - promoters50/1976286
cattttagg

SEQ ID NO: 178975 - DNA, 8 bp, Unknown
  misc_feature (1)..( 8): Result.005 file - promoters50/1976286
aaatcaaa

SEQ ID NO: 178976 - DNA, 8 bp, Unknown
  misc_feature (1)..( 8): Result.005 file - promoters50/1976286
aaaacaat

SEQ ID NO: 178977 - DNA, 8 bp, Unknown
  misc_feature (1)..( 8): Result.005 file - promoters50/1976286
caaacaca

SEQ ID NO: 178978 - DNA, 8 bp, Unknown
  misc_feature (1)..( 8): Result.005 file - promoters50/1976286
taattatt

SEQ ID NO: 178979 - DNA, 8 bp, Unknown
  misc_feature (1)..( 8): Result.005 file - promoters50/1976286
aaataatt

SEQ ID NO: 178980 - DNA, 8 bp, Unknown
  misc_feature (1)..( 8): Result.005 file - promoters50/1976286
aaataaaa

SEQ ID NO: 178981 - DNA, 10 bp, Unknown
  misc_feature (1)..( 10): Result.005 file - promoters50/1976286
tactttttta

SEQ ID NO: 178982 - DNA, 10 bp, Unknown
  misc_feature (1)..( 10): Result.005 file - promoters50/1976286
tcctttttta

SEQ ID NO: 178983 - DNA, 10 bp, Unknown
  misc_feature (1)..( 10): Result.005 file - promoters50/1976286
tccttttctt

SEQ ID NO: 178984 - DNA, 8 bp, Unknown
  misc_feature (1)..( 8): Result.005 file - promoters50/1976286
gggctttt

SEQ ID NO: 178985 - DNA, 8 bp, Unknown
  misc_feature (1)..( 8): Result.005 file - promoters50/1976286
ccgctttt

SEQ ID NO: 178986 - DNA, 8 bp, Unknown
  misc_feature (1)..( 8): Result.005 file - promoters50/1976286
ccgatttg

SEQ ID NO: 178987 - DNA, 10 bp, Unknown
  misc_feature (1)..( 10): Result.005 file - promoters50/1976298
ttacaaaaaa

SEQ ID NO: 178988 - DNA, 10 bp, Unknown
  misc_feature (1)..( 10): Result.005 file - promoters50/1976298
agacagaaag

SEQ ID NO: 178989 - DNA, 11 bp, Unknown
  misc_feature (1)..( 11): Result.005 file - promoters50/1976298
caacaaataat

SEQ ID NO: 178990 - DNA, 7 bp, Unknown
  misc_feature (1)..( 7): Result.005 file - promoters50/1976298
attaaaa

SEQ ID NO: 178991 - DNA, 7 bp, Unknown
  misc_feature (1)..( 7): Result.005 file - promoters50/1976298
attaaaa

SEQ ID NO: 178992 - DNA, 7 bp, Unknown
  misc_feature (1)..( 7): Result.005 file - promoters50/1976298
attaaac

SEQ ID NO: 178993 - DNA, 9 bp, Unknown
  misc_feature (1)..( 9): Result.005 file - promoters50/1976298
taattaaat

SEQ ID NO: 178994 - DNA, 9 bp, Unknown
  misc_feature (1)..( 9): Result.005 file - promoters50/1976298
atattaaac

SEQ ID NO: 178995 - DNA, 9 bp, Unknown
  misc_feature (1)..( 9): Result.005 file - promoters50/1976298
taatttaat

SEQ ID NO: 178996 - DNA, 9 bp, Unknown
  misc_feature (1)..( 9): Result.005 file - promoters50/1976298
caattaaaa

SEQ ID NO: 178997 - DNA, 7 bp, Unknown
  misc_feature (1)..( 7): Result.005 file - promoters50/1976298
tctagac

SEQ ID NO: 178998 - DNA, 7 bp, Unknown
  misc_feature (1)..( 7): Result.005 file - promoters50/1976298
tcttgac

SEQ ID NO: 178999 - DNA, 7 bp, Unknown
  misc_feature (1)..( 7): Result.005 file - promoters50/1976298
tctagaa

SEQ ID NO: 179000 - DNA, 7 bp, Unknown
  misc_feature (1)..( 7): Result.005 file - promoters50/1976298
atatttt

SEQ ID NO: 179001 - DNA, 7 bp, Unknown
  misc_feature (1)..( 7): Result.005 file - promoters50/1976298
ttatttt

SEQ ID NO: 179002 - DNA, 7 bp, Unknown
  misc_feature (1)..( 7): Result.005 file - promoters50/1976298
atattta

SEQ ID NO: 179003 - DNA, 9 bp, Unknown
  misc_feature (1)..( 9): Result.005 file - promoters50/1976336
aaataaact

SEQ ID NO: 179004 - DNA, 9 bp, Unknown
  misc_feature (1)..( 9): Result.005 file - promoters50/1976336
aaacaaatc

SEQ ID NO: 179005 - DNA, 9 bp, Unknown
  misc_feature (1)..( 9): Result.005 file - promoters50/1976336
aaacaaata

SEQ ID NO: 179006 - DNA, 9 bp, Unknown
  misc_feature (1)..( 9): Result.005 file - promoters50/1976336
aaaccaatg

SEQ ID NO: 179007 - DNA, 9 bp, Unknown
  misc_feature (1)..( 9): Result.005 file - promoters50/1976336
gaacaaagg

SEQ ID NO: 179008 - DNA, 9 bp, Unknown
  misc_feature (1)..( 9): Result.005 file - promoters50/1976336
acacaaacc

SEQ ID NO: 179009 - DNA, 9 bp, Unknown
  misc_feature (1)..( 9): Result.005 file - promoters50/1976336
agaattttt

SEQ ID NO: 179010 - DNA, 9 bp, Unknown
  misc_feature (1)..( 9): Result.005 file - promoters50/1976336
agatttttt

SEQ ID NO: 179011 - DNA, 9 bp, Unknown
  misc_feature (1)..( 9): Result.005 file - promoters50/1976336
ggaaatttt

SEQ ID NO: 179012 - DNA, 9 bp, Unknown
  misc_feature (1)..( 9): Result.005 file - promoters50/1976336
caaattttt

SEQ ID NO: 179013 - DNA, 9 bp, Unknown
  misc_feature (1)..( 9): Result.005 file - promoters50/1976336
acgtttttt

SEQ ID NO: 179014 - DNA, 9 bp, Unknown
  misc_feature (1)..( 9): Result.005 file - promoters50/1976336
gtaatattt

SEQ ID NO: 179015 - DNA, 12 bp, Unknown
  misc_feature (1)..( 12): Result.005 file - promoters50/1976354
atagttaaactg

SEQ ID NO: 179016 - DNA, 12 bp, Unknown
  misc_feature (1)..( 12): Result.005 file - promoters50/1976354
atagttatcatc

SEQ ID NO: 179017 - DNA, 12 bp, Unknown
  misc_feature (1)..( 12): Result.005 file - promoters50/1976354
tcagttatcctc

SEQ ID NO: 179018 - DNA, 12 bp, Unknown
  misc_feature (1)..( 12): Result.005 file - promoters50/1976354
acagtgatcaaa

SEQ ID NO: 179019 - DNA, 12 bp, Unknown
  misc_feature (1)..( 12): Result.005 file - promoters50/1976354
ggcctgatgaaa

SEQ ID NO: 179020 - DNA, 12 bp, Unknown
  misc_feature (1)..( 12): Result.005 file - promoters50/1976354
gaactgaggaag

SEQ ID NO: 179021 - DNA, 11 bp, Unknown
  misc_feature (1)..( 11): Result.005 file - promoters50/1976373
tgtcaatgctg

SEQ ID NO: 179022 - DNA, 11 bp, Unknown
  misc_feature (1)..( 11): Result.005 file - promoters50/1976373
tgttaattaat

SEQ ID NO: 179023 - DNA, 11 bp, Unknown
  misc_feature (1)..( 11): Result.005 file - promoters50/1976373
atttaatcaat

SEQ ID NO: 179024 - DNA, 9 bp, Unknown
  misc_feature (1)..( 9): Result.005 file - promoters50/1976373
actgcacct

SEQ ID NO: 179025 - DNA, 9 bp, Unknown
  misc_feature (1)..( 9): Result.005 file - promoters50/1976373
actccacgt

SEQ ID NO: 179026 - DNA, 9 bp, Unknown
  misc_feature (1)..( 9): Result.005 file - promoters50/1976373
attccacgt

SEQ ID NO: 179027 - DNA, 9 bp, Unknown
  misc_feature (1)..( 9): Result.005 file - promoters50/1976373
cttatatac

SEQ ID NO: 179028 - DNA, 9 bp, Unknown
  misc_feature (1)..( 9): Result.005 file - promoters50/1976373
aatatatac

SEQ ID NO: 179029 - DNA, 9 bp, Unknown
  misc_feature (1)..( 9): Result.005 file - promoters50/1976373
aatttatct

SEQ ID NO: 179030 - DNA, 13 bp, Unknown
  misc_feature (1)..( 13): Result.005 file - promoters50/1976381
tgtacaagaaaaa

SEQ ID NO: 179031 - DNA, 13 bp, Unknown
  misc_feature (1)..( 13): Result.005 file - promoters50/1976381
gcaacaagaagag

SEQ ID NO: 179032 - DNA, 13 bp, Unknown
  misc_feature (1)..( 13): Result.005 file - promoters50/1976381
atcacaagaacta

SEQ ID NO: 179033 - DNA, 13 bp, Unknown
  misc_feature (1)..( 13): Result.005 file - promoters50/1976381
accacacgaaaaa

SEQ ID NO: 179034 - DNA, 13 bp, Unknown
  misc_feature (1)..( 13): Result.005 file - promoters50/1976381
tctccgagaaaaa

SEQ ID NO: 179035 - DNA, 13 bp, Unknown
  misc_feature (1)..( 13): Result.005 file - promoters50/1976381
gaaacagaaacct

SEQ ID NO: 179036 - DNA, 13 bp, Unknown
  misc_feature (1)..( 13): Result.005 file - promoters50/1976381
agtacacgacatc

SEQ ID NO: 179037 - DNA, 14 bp, Unknown
  misc_feature (1)..( 14): Result.005 file - promoters50/1976381
ttgtataaatcatt

SEQ ID NO: 179038 - DNA, 14 bp, Unknown
  misc_feature (1)..( 14): Result.005 file - promoters50/1976381
gtttatgaatctgc

SEQ ID NO: 179039 - DNA, 14 bp, Unknown
  misc_feature (1)..( 14): Result.005 file - promoters50/1976381
ttatgtaaataatt

SEQ ID NO: 179040 - DNA, 14 bp, Unknown
  misc_feature (1)..( 14): Result.005 file - promoters50/1976381
gtttctgaaacaga

SEQ ID NO: 179041 - DNA, 14 bp, Unknown
  misc_feature (1)..( 14): Result.005 file - promoters50/1976381
tcctttgattcttg

SEQ ID NO: 179042 - DNA, 14 bp, Unknown
  misc_feature (1)..( 14): Result.005 file - promoters50/1976381
cataatgaatgggc

SEQ ID NO: 179043 - DNA, 13 bp, Unknown
  misc_feature (1)..( 13): Result.005 file - promoters50/1976387
ctaaaggcccaat

SEQ ID NO: 179044 - DNA, 13 bp, Unknown
  misc_feature (1)..( 13): Result.005 file - promoters50/1976387
gtgaaagcccaaa

SEQ ID NO: 179045 - DNA, 13 bp, Unknown
  misc_feature (1)..( 13): Result.005 file - promoters50/1976387
ggaatggcccagt

SEQ ID NO: 179046 - DNA, 13 bp, Unknown
  misc_feature (1)..( 13): Result.005 file - promoters50/1976387
ctaaaggcccaat

SEQ ID NO: 179047 - DNA, 13 bp, Unknown
  misc_feature (1)..( 13): Result.005 file - promoters50/1976387
ggcttggcccaaa

SEQ ID NO: 179048 - DNA, 13 bp, Unknown
  misc_feature (1)..( 13): Result.005 file - promoters50/1976387
aattcggcccatc

SEQ ID NO: 179049 - DNA, 14 bp, Unknown
  misc_feature (1)..( 14): Result.005 file - promoters50/1976387
tcatcagaaaagtc

SEQ ID NO: 179050 - DNA, 14 bp, Unknown
  misc_feature (1)..( 14): Result.005 file - promoters50/1976387
acgtaagaaaaaaa

SEQ ID NO: 179051 - DNA, 14 bp, Unknown
  misc_feature (1)..( 14): Result.005 file - promoters50/1976387
attaaagaaaagac

SEQ ID NO: 179052 - DNA, 15 bp, Unknown
  misc_feature (1)..( 15): Result.005 file - promoters50/1976387
aatgtgttaaaagac

SEQ ID NO: 179053 - DNA, 15 bp, Unknown
  misc_feature (1)..( 15): Result.005 file - promoters50/1976387
gcataagataaaatc

SEQ ID NO: 179054 - DNA, 15 bp, Unknown
  misc_feature (1)..( 15): Result.005 file - promoters50/1976387
taatcaaataaaata

SEQ ID NO: 179055 - DNA, 8 bp, Unknown
  misc_feature (1)..( 8): Result.005 file - promoters50/1976412
ctaaaaat

SEQ ID NO: 179056 - DNA, 8 bp, Unknown
  misc_feature (1)..( 8): Result.005 file - promoters50/1976412
ctaataat

SEQ ID NO: 179057 - DNA, 8 bp, Unknown
  misc_feature (1)..( 8): Result.005 file - promoters50/1976412
ttaataat

SEQ ID NO: 179058 - DNA, 8 bp, Unknown
  misc_feature (1)..( 8): Result.005 file - promoters50/1976412
caaaatta

SEQ ID NO: 179059 - DNA, 8 bp, Unknown
  misc_feature (1)..( 8): Result.005 file - promoters50/1976412
aaaaatta

SEQ ID NO: 179060 - DNA, 8 bp, Unknown
  misc_feature (1)..( 8): Result.005 file - promoters50/1976412
caatattt

SEQ ID NO: 179061 - DNA, 8 bp, Unknown
  misc_feature (1)..( 8): Result.005 file - promoters50/1976412
ataaaaac

SEQ ID NO: 179062 - DNA, 8 bp, Unknown
  misc_feature (1)..( 8): Result.005 file - promoters50/1976412
ataataac

SEQ ID NO: 179063 - DNA, 8 bp, Unknown
  misc_feature (1)..( 8): Result.005 file - promoters50/1976412
ataatata

SEQ ID NO: 179064 - DNA, 8 bp, Unknown
  misc_feature (1)..( 8): Result.005 file - promoters50/1976412
ctatttaa

SEQ ID NO: 179065 - DNA, 8 bp, Unknown
  misc_feature (1)..( 8): Result.005 file - promoters50/1976412
ctaattat

SEQ ID NO: 179066 - DNA, 8 bp, Unknown
  misc_feature (1)..( 8): Result.005 file - promoters50/1976412
tgaattat

SEQ ID NO: 179067 - DNA, 7 bp, Unknown
  misc_feature (1)..( 7): Result.005 file - promoters50/1976412
caatttt

SEQ ID NO: 179068 - DNA, 7 bp, Unknown
  misc_feature (1)..( 7): Result.005 file - promoters50/1976412
taatttt

SEQ ID NO: 179069 - DNA, 7 bp, Unknown
  misc_feature (1)..( 7): Result.005 file - promoters50/1976412
taattta

SEQ ID NO: 179070 - DNA, 10 bp, Unknown
  misc_feature (1)..( 10): Result.005 file - promoters50/1976437
ttcttatcac

SEQ ID NO: 179071 - DNA, 10 bp, Unknown
  misc_feature (1)..( 10): Result.005 file - promoters50/1976437
ttcttaattt

SEQ ID NO: 179072 - DNA, 10 bp, Unknown
  misc_feature (1)..( 10): Result.005 file - promoters50/1976437
atcttgattt

SEQ ID NO: 179073 - DNA, 9 bp, Unknown
  misc_feature (1)..( 9): Result.005 file - promoters50/1976437
gaacattgt

SEQ ID NO: 179074 - DNA, 9 bp, Unknown
  misc_feature (1)..( 9): Result.005 file - promoters50/1976437
gaacatgac

SEQ ID NO: 179075 - DNA, 9 bp, Unknown
  misc_feature (1)..( 9): Result.005 file - promoters50/1976437
aaacaggac

SEQ ID NO: 179076 - DNA, 13 bp, Unknown
  misc_feature (1)..( 13): Result.005 file - promoters50/1976457
ttttaatatatat

SEQ ID NO: 179077 - DNA, 13 bp, Unknown
  misc_feature (1)..( 13): Result.005 file - promoters50/1976457
gtttactatttat

SEQ ID NO: 179078 - DNA, 14 bp, Unknown
  misc_feature (1)..( 14): Result.005 file - promoters50/1976457
tttgtaataataac

SEQ ID NO: 179079 - DNA, 14 bp, Unknown
  misc_feature (1)..( 14): Result.005 file - promoters50/1976457
tttttaatttcttt

SEQ ID NO: 179080 - DNA, 14 bp, Unknown
  misc_feature (1)..( 14): Result.005 file - promoters50/1976457
ctattaataaaatt

SEQ ID NO: 179081 - DNA, 14 bp, Unknown
  misc_feature (1)..( 14): Result.005 file - promoters50/1976457
aataaactcttttg

SEQ ID NO: 179082 - DNA, 10 bp, Unknown
  misc_feature (1)..( 10): Result.005 file - promoters50/1976457
taaataatat

SEQ ID NO: 179083 - DNA, 10 bp, Unknown
  misc_feature (1)..( 10): Result.005 file - promoters50/1976457
ataataatgt

SEQ ID NO: 179084 - DNA, 10 bp, Unknown
  misc_feature (1)..( 10): Result.005 file - promoters50/1976457
caaagaataa

SEQ ID NO: 179085 - DNA, 10 bp, Unknown
  misc_feature (1)..( 10): Result.005 file - promoters50/1976457
tatatagtat

SEQ ID NO: 179086 - DNA, 10 bp, Unknown
  misc_feature (1)..( 10): Result.005 file - promoters50/1976457
gtaataataa

SEQ ID NO: 179087 - DNA, 10 bp, Unknown
  misc_feature (1)..( 10): Result.005 file - promoters50/1976457
ttaataaaat

SEQ ID NO: 179088 - DNA, 10 bp, Unknown
  misc_feature (1)..( 10): Result.005 file - promoters50/1976457
ataataaact

SEQ ID NO: 179089 - DNA, 10 bp, Unknown
  misc_feature (1)..( 10): Result.005 file - promoters50/1976457
atactaaaag

SEQ ID NO: 179090 - DNA, 12 bp, Unknown
  misc_feature (1)..( 12): Result.005 file - promoters50/1976504
attttgttttct

SEQ ID NO: 179091 - DNA, 12 bp, Unknown
  misc_feature (1)..( 12): Result.005 file - promoters50/1976504
attatgtcttcc

SEQ ID NO: 179092 - DNA, 12 bp, Unknown
  misc_feature (1)..( 12): Result.005 file - promoters50/1976504
ctattgttttga

SEQ ID NO: 179093 - DNA, 12 bp, Unknown
  misc_feature (1)..( 12): Result.005 file - promoters50/1976504
attttgtggtga

SEQ ID NO: 179094 - DNA, 12 bp, Unknown
  misc_feature (1)..( 12): Result.005 file - promoters50/1976504
gcagcgttttct

SEQ ID NO: 179095 - DNA, 12 bp, Unknown
  misc_feature (1)..( 12): Result.005 file - promoters50/1976504
ttttagtgatat

SEQ ID NO: 179096 - DNA, 12 bp, Unknown
  misc_feature (1)..( 12): Result.005 file - promoters50/1976504
taaaatatatat

SEQ ID NO: 179097 - DNA, 12 bp, Unknown
  misc_feature (1)..( 12): Result.005 file - promoters50/1976504
gaaagtattcag

SEQ ID NO: 179098 - DNA, 12 bp, Unknown
  misc_feature (1)..( 12): Result.005 file - promoters50/1976504
gaaaacataaca

SEQ ID NO: 179099 - DNA, 12 bp, Unknown
  misc_feature (1)..( 12): Result.005 file - promoters50/1976504
taaaattcaagg

SEQ ID NO: 179100 - DNA, 12 bp, Unknown
  misc_feature (1)..( 12): Result.005 file - promoters50/1976504
tgaagtatcctc

SEQ ID NO: 179101 - DNA, 12 bp, Unknown
  misc_feature (1)..( 12): Result.005 file - promoters50/1976504
aaaaacaaattt

SEQ ID NO: 179102 - DNA, 12 bp, Unknown
  misc_feature (1)..( 12): Result.005 file - promoters50/1976504
ctgaacagaaca

SEQ ID NO: 179103 - DNA, 12 bp, Unknown
  misc_feature (1)..( 12): Result.005 file - promoters50/1976504
ggcctaaatact

SEQ ID NO: 179104 - DNA, 12 bp, Unknown
  misc_feature (1)..( 12): Result.005 file - promoters50/1976504
tctgaaaataca

SEQ ID NO: 179105 - DNA, 12 bp, Unknown
  misc_feature (1)..( 12): Result.005 file - promoters50/1976504
agagaaaataaa

SEQ ID NO: 179106 - DNA, 12 bp, Unknown
  misc_feature (1)..( 12): Result.005 file - promoters50/1976504
tattaaaaaaaa

SEQ ID NO: 179107 - DNA, 12 bp, Unknown
  misc_feature (1)..( 12): Result.005 file - promoters50/1976504
atttaaaaacaa

SEQ ID NO: 179108 - DNA, 12 bp, Unknown
  misc_feature (1)..( 12): Result.005 file - promoters50/1976504
cattaataaatt

SEQ ID NO: 179109 - DNA, 12 bp, Unknown
  misc_feature (1)..( 12): Result.005 file - promoters50/1976504
ttttaaaacaag

SEQ ID NO: 179110 - DNA, 12 bp, Unknown
  misc_feature (1)..( 12): Result.005 file - promoters50/1976504
ttttaatctgaa

SEQ ID NO: 179111 - DNA, 12 bp, Unknown
  misc_feature (1)..( 12): Result.005 file - promoters50/1976504
atttaaaaacaa

SEQ ID NO: 179112 - DNA, 12 bp, Unknown
  misc_feature (1)..( 12): Result.005 file - promoters50/1976504
attgaaacgttg

SEQ ID NO: 179113 - DNA, 12 bp, Unknown
  misc_feature (1)..( 12): Result.005 file - promoters50/1976504
attgaataaaag

SEQ ID NO: 179114 - DNA, 12 bp, Unknown
  misc_feature (1)..( 12): Result.005 file - promoters50/1976504
attaaaaaaaaa

SEQ ID NO: 179115 - DNA, 11 bp, Unknown
  misc_feature (1)..( 11): Result.005 file - promoters50/1976511
gagaaagctgg

SEQ ID NO: 179116 - DNA, 11 bp, Unknown
  misc_feature (1)..( 11): Result.005 file - promoters50/1976511
cagagagctca

SEQ ID NO: 179117 - DNA, 11 bp, Unknown
  misc_feature (1)..( 11): Result.005 file - promoters50/1976511
gtcaaacctga

SEQ ID NO: 179118 - DNA, 11 bp, Unknown
  misc_feature (1)..( 11): Result.005 file - promoters50/1976511
cagagactaac

SEQ ID NO: 179119 - DNA, 11 bp, Unknown
  misc_feature (1)..( 11): Result.005 file - promoters50/1976511
ttacaacatga

SEQ ID NO: 179120 - DNA, 11 bp, Unknown
  misc_feature (1)..( 11): Result.005 file - promoters50/1976511
ttggtacatga

SEQ ID NO: 179121 - DNA, 16 bp, Unknown
  misc_feature (1)..( 16): Result.005 file - promoters50/1976511
taccattttgatttga

SEQ ID NO: 179122 - DNA, 16 bp, Unknown
  misc_feature (1)..( 16): Result.005 file - promoters50/1976511
ataaattttgattaaa

SEQ ID NO: 179123 - DNA, 16 bp, Unknown
  misc_feature (1)..( 16): Result.005 file - promoters50/1976511
agtggttttgactaga

SEQ ID NO: 179124 - DNA, 16 bp, Unknown
  misc_feature (1)..( 16): Result.005 file - promoters50/1976511
gtgattactgattaat

SEQ ID NO: 179125 - DNA, 16 bp, Unknown
  misc_feature (1)..( 16): Result.005 file - promoters50/1976511
agtcgttttgttttta

SEQ ID NO: 179126 - DNA, 16 bp, Unknown
  misc_feature (1)..( 16): Result.005 file - promoters50/1976511
gcgaatcaaaattaat

SEQ ID NO: 179127 - DNA, 9 bp, Unknown
  misc_feature (1)..( 9): Result.005 file - promoters50/1976511
gttttttct

SEQ ID NO: 179128 - DNA, 9 bp, Unknown
  misc_feature (1)..( 9): Result.005 file - promoters50/1976511
ctttcttct

SEQ ID NO: 179129 - DNA, 9 bp, Unknown
  misc_feature (1)..( 9): Result.005 file - promoters50/1976511
gtttttgaa

SEQ ID NO: 179130 - DNA, 9 bp, Unknown
  misc_feature (1)..( 9): Result.005 file - promoters50/1976511
gttgtttag

SEQ ID NO: 179131 - DNA, 9 bp, Unknown
  misc_feature (1)..( 9): Result.005 file - promoters50/1976511
tcttcttct

SEQ ID NO: 179132 - DNA, 9 bp, Unknown
  misc_feature (1)..( 9): Result.005 file - promoters50/1976511
tctttttgt

SEQ ID NO: 179133 - DNA, 10 bp, Unknown
  misc_feature (1)..( 10): Result.005 file - promoters50/1976550
taatctgatc

SEQ ID NO: 179134 - DNA, 10 bp, Unknown
  misc_feature (1)..( 10): Result.005 file - promoters50/1976550
caatcttatc

SEQ ID NO: 179135 - DNA, 10 bp, Unknown
  misc_feature (1)..( 10): Result.005 file - promoters50/1976550
taatttgata

SEQ ID NO: 179136 - DNA, 13 bp, Unknown
  misc_feature (1)..( 13): Result.005 file - promoters50/1977519
ttgaatcaatatt

SEQ ID NO: 179137 - DNA, 13 bp, Unknown
  misc_feature (1)..( 13): Result.005 file - promoters50/1977519
ttgattcaaaatt

SEQ ID NO: 179138 - DNA, 13 bp, Unknown
  misc_feature (1)..( 13): Result.005 file - promoters50/1977519
ttgagtcaattat

SEQ ID NO: 179139 - DNA, 9 bp, Unknown
  misc_feature (1)..( 9): Result.005 file - promoters50/1977519
gatttggtt

SEQ ID NO: 179140 - DNA, 9 bp, Unknown
  misc_feature (1)..( 9): Result.005 file - promoters50/1977519
gtcttggtt

SEQ ID NO: 179141 - DNA, 9 bp, Unknown
  misc_feature (1)..( 9): Result.005 file - promoters50/1977519
gattttgtt

SEQ ID NO: 179142 - DNA, 7 bp, Unknown
  misc_feature (1)..( 7): Result.005 file - promoters50/1977529
cttcaat

SEQ ID NO: 179143 - DNA, 7 bp, Unknown
  misc_feature (1)..( 7): Result.005 file - promoters50/1977529
cttcaaa

SEQ ID NO: 179144 - DNA, 7 bp, Unknown
  misc_feature (1)..( 7): Result.005 file - promoters50/1977529
attcaaa

SEQ ID NO: 179145 - DNA, 7 bp, Unknown
  misc_feature (1)..( 7): Result.005 file - promoters50/1977529
ttcaaac

SEQ ID NO: 179146 - DNA, 7 bp, Unknown
  misc_feature (1)..( 7): Result.005 file - promoters50/1977529
ttcaaac

SEQ ID NO: 179147 - DNA, 7 bp, Unknown
  misc_feature (1)..( 7): Result.005 file - promoters50/1977529
ttcaaaa

SEQ ID NO: 179148 - DNA, 9 bp, Unknown
  misc_feature (1)..( 9): Result.005 file - promoters50/1977533
ctaagttta

SEQ ID NO: 179149 - DNA, 9 bp, Unknown
  misc_feature (1)..( 9): Result.005 file - promoters50/1977533
aaaagtttg

SEQ ID NO: 179150 - DNA, 9 bp, Unknown
  misc_feature (1)..( 9): Result.005 file - promoters50/1977533
ataaatttg

SEQ ID NO: 179151 - DNA, 9 bp, Unknown
  misc_feature (1)..( 9): Result.005 file - promoters50/1977533
aaaagtttg

SEQ ID NO: 179152 - DNA, 9 bp, Unknown
  misc_feature (1)..( 9): Result.005 file - promoters50/1977533
catagttta

SEQ ID NO: 179153 - DNA, 9 bp, Unknown
  misc_feature (1)..( 9): Result.005 file - promoters50/1977533
aaaagcttg

SEQ ID NO: 179154 - DNA, 9 bp, Unknown
  misc_feature (1)..( 9): Result.005 file - promoters50/1977533
taaacccta

SEQ ID NO: 179155 - DNA, 9 bp, Unknown
  misc_feature (1)..( 9): Result.005 file - promoters50/1977533
aaaaccctg

SEQ ID NO: 179156 - DNA, 9 bp, Unknown
  misc_feature (1)..( 9): Result.005 file - promoters50/1977533
gaaacccta

SEQ ID NO: 179157 - DNA, 9 bp, Unknown
  misc_feature (1)..( 9): Result.005 file - promoters50/1977533
aaaacctag

SEQ ID NO: 179158 - DNA, 9 bp, Unknown
  misc_feature (1)..( 9): Result.005 file - promoters50/1977533
taaatctaa

SEQ ID NO: 179159 - DNA, 9 bp, Unknown
  misc_feature (1)..( 9): Result.005 file - promoters50/1977533
aaaaactag

SEQ ID NO: 179160 - DNA, 12 bp, Unknown
  misc_feature (1)..( 12): Result.005 file - promoters50/1977533
ctcttaaaattg

SEQ ID NO: 179161 - DNA, 12 bp, Unknown
  misc_feature (1)..( 12): Result.005 file - promoters50/1977533
agaacaaacttg

SEQ ID NO: 179162 - DNA, 12 bp, Unknown
  misc_feature (1)..( 12): Result.005 file - promoters50/1977533
ttgttaaaatat

SEQ ID NO: 179163 - DNA, 12 bp, Unknown
  misc_feature (1)..( 12): Result.005 file - promoters50/1977533
aaaaaaaacttg

SEQ ID NO: 179164 - DNA, 12 bp, Unknown
  misc_feature (1)..( 12): Result.005 file - promoters50/1977533
taagcaaactta

SEQ ID NO: 179165 - DNA, 12 bp, Unknown
  misc_feature (1)..( 12): Result.005 file - promoters50/1977533
ttgttaaatctc

SEQ ID NO: 179166 - DNA, 10 bp, Unknown
  misc_feature (1)..( 10): Result.005 file - promoters50/1977537
agattttgag

SEQ ID NO: 179167 - DNA, 10 bp, Unknown
  misc_feature (1)..( 10): Result.005 file - promoters50/1977537
tgattttttt

SEQ ID NO: 179168 - DNA, 10 bp, Unknown
  misc_feature (1)..( 10): Result.005 file - promoters50/1977537
ctattttttt

SEQ ID NO: 179169 - DNA, 10 bp, Unknown
  misc_feature (1)..( 10): Result.005 file - promoters50/1977537
tgatttggtt

SEQ ID NO: 179170 - DNA, 10 bp, Unknown
  misc_feature (1)..( 10): Result.005 file - promoters50/1977537
tgaattgtta

SEQ ID NO: 179171 - DNA, 11 bp, Unknown
  misc_feature (1)..( 11): Result.005 file - promoters50/1977537
aaatttaatta

SEQ ID NO: 179172 - DNA, 11 bp, Unknown
  misc_feature (1)..( 11): Result.005 file - promoters50/1977537
aaatttggtaa

SEQ ID NO: 179173 - DNA, 11 bp, Unknown
  misc_feature (1)..( 11): Result.005 file - promoters50/1977537
caatataagtc

SEQ ID NO: 179174 - DNA, 11 bp, Unknown
  misc_feature (1)..( 11): Result.005 file - promoters50/1977537
caatatcccta

SEQ ID NO: 179175 - DNA, 11 bp, Unknown
  misc_feature (1)..( 11): Result.005 file - promoters50/1977537
acgtatacgtc

SEQ ID NO: 179176 - DNA, 7 bp, Unknown
  misc_feature (1)..( 7): Result.005 file - promoters50/1985373
ttttttt

SEQ ID NO: 179177 - DNA, 7 bp, Unknown
  misc_feature (1)..( 7): Result.005 file - promoters50/1985373
ttttttt

SEQ ID NO: 179178 - DNA, 7 bp, Unknown
  misc_feature (1)..( 7): Result.005 file - promoters50/1985373
tttttta

SEQ ID NO: 179179 - DNA, 15 bp, Unknown
  misc_feature (1)..( 15): Result.005 file - promoters50/1985373
tatgcttatttttca

SEQ ID NO: 179180 - DNA, 15 bp, Unknown
  misc_feature (1)..( 15): Result.005 file - promoters50/1985373
tatgtttaatttaca

SEQ ID NO: 179181 - DNA, 15 bp, Unknown
  misc_feature (1)..( 15): Result.005 file - promoters50/1985373
aatatataatttaca

SEQ ID NO: 179182 - DNA, 9 bp, Unknown
  misc_feature (1)..( 9): Result.005 file - promoters50/1985373
atacagtat

SEQ ID NO: 179183 - DNA, 9 bp, Unknown
  misc_feature (1)..( 9): Result.005 file - promoters50/1985373
ataaagtat

SEQ ID NO: 179184 - DNA, 9 bp, Unknown
  misc_feature (1)..( 9): Result.005 file - promoters50/1985373
ttaaaaacc

SEQ ID NO: 179185 - DNA, 9 bp, Unknown
  misc_feature (1)..( 9): Result.005 file - promoters50/1985373
aaaacaaaa

SEQ ID NO: 179186 - DNA, 9 bp, Unknown
  misc_feature (1)..( 9): Result.005 file - promoters50/1985373
gaaataaaa

SEQ ID NO: 179187 - DNA, 9 bp, Unknown
  misc_feature (1)..( 9): Result.005 file - promoters50/1985373
gaaatacaa

SEQ ID NO: 179188 - DNA, 10 bp, Unknown
  misc_feature (1)..( 10): Result.005 file - promoters50/1985415
aatatacagt

SEQ ID NO: 179189 - DNA, 10 bp, Unknown
  misc_feature (1)..( 10): Result.005 file - promoters50/1985415
tataaacact

SEQ ID NO: 179190 - DNA, 10 bp, Unknown
  misc_feature (1)..( 10): Result.005 file - promoters50/1985415
tatatagagt

SEQ ID NO: 179191 - DNA, 10 bp, Unknown
  misc_feature (1)..( 10): Result.005 file - promoters50/1985415
tttaaaaaaa

SEQ ID NO: 179192 - DNA, 10 bp, Unknown
  misc_feature (1)..( 10): Result.005 file - promoters50/1985415
ttttaacaaa

SEQ ID NO: 179193 - DNA, 8 bp, Unknown
  misc_feature (1)..( 8): Result.005 file - promoters50/1985415
ctcatttc

SEQ ID NO: 179194 - DNA, 8 bp, Unknown
  misc_feature (1)..( 8): Result.005 file - promoters50/1985415
ctcatttt

SEQ ID NO: 179195 - DNA, 9 bp, Unknown
  misc_feature (1)..( 9): Result.005 file - promoters50/1985415
aacatgttg

SEQ ID NO: 179196 - DNA, 9 bp, Unknown
  misc_feature (1)..( 9): Result.005 file - promoters50/1985415
aacattttt

SEQ ID NO: 179197 - DNA, 9 bp, Unknown
  misc_feature (1)..( 9): Result.005 file - promoters50/1985415
ttaatattt

SEQ ID NO: 179198 - DNA, 8 bp, Unknown
  misc_feature (1)..( 8): Result.005 file - promoters50/1985415
cttttaaa

SEQ ID NO: 179199 - DNA, 8 bp, Unknown
  misc_feature (1)..( 8): Result.005 file - promoters50/1985415
tttttaac

SEQ ID NO: 179200 - DNA, 8 bp, Unknown
  misc_feature (1)..( 8): Result.005 file - promoters50/1985415
attttaaa

SEQ ID NO: 179201 - DNA, 8 bp, Unknown
  misc_feature (1)..( 8): Result.005 file - promoters50/1985415
cttataaa

SEQ ID NO: 179202 - DNA, 8 bp, Unknown
  misc_feature (1)..( 8): Result.005 file - promoters50/1985415
cttttatc

SEQ ID NO: 179203 - DNA, 10 bp, Unknown
  misc_feature (1)..( 10): Result.005 file - promoters50/1985477
cgttagaaac

SEQ ID NO: 179204 - DNA, 10 bp, Unknown
  misc_feature (1)..( 10): Result.005 file - promoters50/1985477
tattataaaa

SEQ ID NO: 179205 - DNA, 11 bp, Unknown
  misc_feature (1)..( 11): Result.005 file - promoters50/1985477
tattattaaaa

SEQ ID NO: 179206 - DNA, 9 bp, Unknown
  misc_feature (1)..( 9): Result.005 file - promoters50/1985588
aattttatt

SEQ ID NO: 179207 - DNA, 9 bp, Unknown
  misc_feature (1)..( 9): Result.005 file - promoters50/1985588
gttttgatt

SEQ ID NO: 179208 - DNA, 9 bp, Unknown
  misc_feature (1)..( 9): Result.005 file - promoters50/1985588
aatcttata

SEQ ID NO: 179209 - DNA, 9 bp, Unknown
  misc_feature (1)..( 9): Result.005 file - promoters50/1985590
caaaataaa

SEQ ID NO: 179210 - DNA, 9 bp, Unknown
  misc_feature (1)..( 9): Result.005 file - promoters50/1985590
aaaactaat

SEQ ID NO: 179211 - DNA, 9 bp, Unknown
  misc_feature (1)..( 9): Result.005 file - promoters50/1985590
caaaataca

SEQ ID NO: 179212 - DNA, 9 bp, Unknown
  misc_feature (1)..( 9): Result.005 file - promoters50/1985590
aaaacttaa

SEQ ID NO: 179213 - DNA, 9 bp, Unknown
  misc_feature (1)..( 9): Result.005 file - promoters50/1985590
gaaaattta

SEQ ID NO: 179214 - DNA, 7 bp, Unknown
  misc_feature (1)..( 7): Result.005 file - promoters50/1985621
aaagtaa

SEQ ID NO: 179215 - DNA, 7 bp, Unknown
  misc_feature (1)..( 7): Result.005 file - promoters50/1985621
aaaataa

SEQ ID NO: 179216 - DNA, 7 bp, Unknown
  misc_feature (1)..( 7): Result.005 file - promoters50/1985621
aaactaa

SEQ ID NO: 179217 - DNA, 6 bp, Unknown
  misc_feature (1)..( 6): Result.005 file - promoters50/1985854
ttttct

SEQ ID NO: 179218 - DNA, 6 bp, Unknown
  misc_feature (1)..( 6): Result.005 file - promoters50/1985854
ttttct

SEQ ID NO: 179219 - DNA, 6 bp, Unknown
  misc_feature (1)..( 6): Result.005 file - promoters50/1985854
ttttct

SEQ ID NO: 179220 - DNA, 13 bp, Unknown
  misc_feature (1)..( 13): Result.005 file - promoters50/1985854
gaatcaaacgaaa

SEQ ID NO: 179221 - DNA, 13 bp, Unknown
  misc_feature (1)..( 13): Result.005 file - promoters50/1985854
aaataaaaccaaa

SEQ ID NO: 179222 - DNA, 13 bp, Unknown
  misc_feature (1)..( 13): Result.005 file - promoters50/1985854
aaataatatagtt

SEQ ID NO: 179223 - DNA, 8 bp, Unknown
  misc_feature (1)..( 8): Result.005 file - promoters50/1985854
caaccaac

SEQ ID NO: 179224 - DNA, 8 bp, Unknown
  misc_feature (1)..( 8): Result.005 file - promoters50/1985854
gtaccaac

SEQ ID NO: 179225 - DNA, 8 bp, Unknown
  misc_feature (1)..( 8): Result.005 file - promoters50/1985854
caatcaaa

SEQ ID NO: 179226 - DNA, 8 bp, Unknown
  misc_feature (1)..( 8): Result.005 file - promoters50/1985854
aattttta

SEQ ID NO: 179227 - DNA, 8 bp, Unknown
  misc_feature (1)..( 8): Result.005 file - promoters50/1985854
aatattta

SEQ ID NO: 179228 - DNA, 8 bp, Unknown
  misc_feature (1)..( 8): Result.005 file - promoters50/1985854
aattttta

SEQ ID NO: 179229 - DNA, 9 bp, Unknown
  misc_feature (1)..( 9): Result.005 file - promoters50/2024838
ggtgttttg

SEQ ID NO: 179230 - DNA, 9 bp, Unknown
  misc_feature (1)..( 9): Result.005 file - promoters50/2024838
tttgttttg

SEQ ID NO: 179231 - DNA, 9 bp, Unknown
  misc_feature (1)..( 9): Result.005 file - promoters50/2024838
tttgtttgg

SEQ ID NO: 179232 - DNA, 9 bp, Unknown
  misc_feature (1)..( 9): Result.005 file - promoters50/2024873
aaatgaaga

SEQ ID NO: 179233 - DNA, 9 bp, Unknown
  misc_feature (1)..( 9): Result.005 file - promoters50/2024873
aaaggaaaa

SEQ ID NO: 179234 - DNA, 9 bp, Unknown
  misc_feature (1)..( 9): Result.005 file - promoters50/2024873
aaataaagc

SEQ ID NO: 179235 - DNA, 9 bp, Unknown
  misc_feature (1)..( 9): Result.005 file - promoters50/2024873
aaataaata

SEQ ID NO: 179236 - DNA, 9 bp, Unknown
  misc_feature (1)..( 9): Result.005 file - promoters50/2024873
tcataaatc

SEQ ID NO: 179237 - DNA, 8 bp, Unknown
  misc_feature (1)..( 8): Result.005 file - promoters50/2024930
tattttag

SEQ ID NO: 179238 - DNA, 8 bp, Unknown
  misc_feature (1)..( 8): Result.005 file - promoters50/2024930
tattatag

SEQ ID NO: 179239 - DNA, 8 bp, Unknown
  misc_feature (1)..( 8): Result.005 file - promoters50/2024930
tattatgt

SEQ ID NO: 179240 - DNA, 9 bp, Unknown
  misc_feature (1)..( 9): Result.005 file - promoters50/2024930
caaatttta

SEQ ID NO: 179241 - DNA, 9 bp, Unknown
  misc_feature (1)..( 9): Result.005 file - promoters50/2024930
ataattttt

SEQ ID NO: 179242 - DNA, 9 bp, Unknown
  misc_feature (1)..( 9): Result.005 file - promoters50/2024930
tttatttta

SEQ ID NO: 179243 - DNA, 10 bp, Unknown
  misc_feature (1)..( 10): Result.005 file - promoters50/2024930
ataatgtttg

SEQ ID NO: 179244 - DNA, 8 bp, Unknown
  misc_feature (1)..( 8): Result.005 file - promoters50/2024930
ttgagtct

SEQ ID NO: 179245 - DNA, 8 bp, Unknown
  misc_feature (1)..( 8): Result.005 file - promoters50/2024930
atgattct

SEQ ID NO: 179246 - DNA, 8 bp, Unknown
  misc_feature (1)..( 8): Result.005 file - promoters50/2024930
ttgagtca

SEQ ID NO: 179247 - DNA, 9 bp, Unknown
  misc_feature (1)..( 9): Result.005 file - promoters50/2024930
taatttagt

SEQ ID NO: 179248 - DNA, 9 bp, Unknown
  misc_feature (1)..( 9): Result.005 file - promoters50/2024930
gaatctagt

SEQ ID NO: 179249 - DNA, 9 bp, Unknown
  misc_feature (1)..( 9): Result.005 file - promoters50/2024930
gaatctcct

SEQ ID NO: 179250 - DNA, 9 bp, Unknown
  misc_feature (1)..( 9): Result.005 file - promoters50/2024930
caaaataag

SEQ ID NO: 179251 - DNA, 9 bp, Unknown
  misc_feature (1)..( 9): Result.005 file - promoters50/2024930
tcaaaaaag

SEQ ID NO: 179252 - DNA, 9 bp, Unknown
  misc_feature (1)..( 9): Result.005 file - promoters50/2024930
tcaaaaaaa

SEQ ID NO: 179253 - DNA, 9 bp, Unknown
  misc_feature (1)..( 9): Result.005 file - promoters50/2024930
gtcaaaaaa

SEQ ID NO: 179254 - DNA, 9 bp, Unknown
  misc_feature (1)..( 9): Result.005 file - promoters50/2024930
gtcaaatcc

SEQ ID NO: 179255 - DNA, 9 bp, Unknown
  misc_feature (1)..( 9): Result.005 file - promoters50/2024930
ctcaaaaaa

SEQ ID NO: 179256 - DNA, 12 bp, Unknown
  misc_feature (1)..( 12): Result.005 file - promoters50/2025006
tcttaaataaat

SEQ ID NO: 179257 - DNA, 12 bp, Unknown
  misc_feature (1)..( 12): Result.005 file - promoters50/2025006
caataaataaaa

SEQ ID NO: 179258 - DNA, 12 bp, Unknown
  misc_feature (1)..( 12): Result.005 file - promoters50/2025006
gaggaaagaaaa

SEQ ID NO: 179259 - DNA, 12 bp, Unknown
  misc_feature (1)..( 12): Result.005 file - promoters50/2025006
ccttctataaaa

SEQ ID NO: 179260 - DNA, 12 bp, Unknown
  misc_feature (1)..( 12): Result.005 file - promoters50/2025006
caatacataatt

SEQ ID NO: 179261 - DNA, 12 bp, Unknown
  misc_feature (1)..( 12): Result.005 file - promoters50/2025006
ttaaaagaaaaa

SEQ ID NO: 179262 - DNA, 12 bp, Unknown
  misc_feature (1)..( 12): Result.005 file - promoters50/2025006
ataaaagaatta

SEQ ID NO: 179263 - DNA, 12 bp, Unknown
  misc_feature (1)..( 12): Result.005 file - promoters50/2025006
ttataagcccat

SEQ ID NO: 179264 - DNA, 12 bp, Unknown
  misc_feature (1)..( 12): Result.005 file - promoters50/2025006
aggaaagaaaaa

SEQ ID NO: 179265 - DNA, 12 bp, Unknown
  misc_feature (1)..( 12): Result.005 file - promoters50/2025006
ataaaatttgtt

SEQ ID NO: 179266 - DNA, 11 bp, Unknown
  misc_feature (1)..( 11): Result.005 file - promoters50/2025006
cataaattgag

SEQ ID NO: 179267 - DNA, 11 bp, Unknown
  misc_feature (1)..( 11): Result.005 file - promoters50/2025006
aataaatatct

SEQ ID NO: 179268 - DNA, 11 bp, Unknown
  misc_feature (1)..( 11): Result.005 file - promoters50/2025006
gataaattttg

SEQ ID NO: 179269 - DNA, 11 bp, Unknown
  misc_feature (1)..( 11): Result.005 file - promoters50/2025006
tttaaaaaaaa

SEQ ID NO: 179270 - DNA, 12 bp, Unknown
  misc_feature (1)..( 12): Result.005 file - promoters50/2025006
tttcaaaattta

SEQ ID NO: 179271 - DNA, 10 bp, Unknown
  misc_feature (1)..( 10): Result.005 file - promoters50/2025006
gaattttttt

SEQ ID NO: 179272 - DNA, 10 bp, Unknown
  misc_feature (1)..( 10): Result.005 file - promoters50/2025006
caattttttt

SEQ ID NO: 179273 - DNA, 10 bp, Unknown
  misc_feature (1)..( 10): Result.005 file - promoters50/2025006
cgctttcttt

SEQ ID NO: 179274 - DNA, 10 bp, Unknown
  misc_feature (1)..( 10): Result.005 file - promoters50/2025006
gaactttaat

SEQ ID NO: 179275 - DNA, 10 bp, Unknown
  misc_feature (1)..( 10): Result.005 file - promoters50/2025006
taactttgta

SEQ ID NO: 179276 - DNA, 9 bp, Unknown
  misc_feature (1)..( 9): Result.005 file - promoters50/2025006
ataaactca

SEQ ID NO: 179277 - DNA, 9 bp, Unknown
  misc_feature (1)..( 9): Result.005 file - promoters50/2025006
ataaacaat

SEQ ID NO: 179278 - DNA, 9 bp, Unknown
  misc_feature (1)..( 9): Result.005 file - promoters50/2025006
atatacaca

SEQ ID NO: 179279 - DNA, 9 bp, Unknown
  misc_feature (1)..( 9): Result.005 file - promoters50/2025006
ataaaaagt

SEQ ID NO: 179280 - DNA, 9 bp, Unknown
  misc_feature (1)..( 9): Result.005 file - promoters50/2025006
acaaacaat

SEQ ID NO: 179281 - DNA, 9 bp, Unknown
  misc_feature (1)..( 9): Result.005 file - promoters50/2025006
aaatttgaa

SEQ ID NO: 179282 - DNA, 9 bp, Unknown
  misc_feature (1)..( 9): Result.005 file - promoters50/2025006
ttgtttgaa

SEQ ID NO: 179283 - DNA, 9 bp, Unknown
  misc_feature (1)..( 9): Result.005 file - promoters50/2025006
aaaattgaa

SEQ ID NO: 179284 - DNA, 9 bp, Unknown
  misc_feature (1)..( 9): Result.005 file - promoters50/2025006
gagttcgaa

SEQ ID NO: 179285 - DNA, 9 bp, Unknown
  misc_feature (1)..( 9): Result.005 file - promoters50/2025006
aaaattaac

SEQ ID NO: 179286 - DNA, 10 bp, Unknown
  misc_feature (1)..( 10): Result.005 file - promoters50/2025306
aaacttgaaa

SEQ ID NO: 179287 - DNA, 10 bp, Unknown
  misc_feature (1)..( 10): Result.005 file - promoters50/2025306
aaacatgaag

SEQ ID NO: 179288 - DNA, 11 bp, Unknown
  misc_feature (1)..( 11): Result.005 file - promoters50/2025306
ctccttgtaaa

SEQ ID NO: 179289 - DNA, 12 bp, Unknown
  misc_feature (1)..( 12): Result.005 file - promoters50/2025306
aagtaataaaac

SEQ ID NO: 179290 - DNA, 12 bp, Unknown
  misc_feature (1)..( 12): Result.005 file - promoters50/2025306
tggttatataac

SEQ ID NO: 179291 - DNA, 12 bp, Unknown
  misc_feature (1)..( 12): Result.005 file - promoters50/2025306
aagaaataaata

SEQ ID NO: 179292 - DNA, 7 bp, Unknown
  misc_feature (1)..( 7): Result.005 file - promoters50/2025306
aaataat

SEQ ID NO: 179293 - DNA, 7 bp, Unknown
  misc_feature (1)..( 7): Result.005 file - promoters50/2025306
aaataag

SEQ ID NO: 179294 - DNA, 7 bp, Unknown
  misc_feature (1)..( 7): Result.005 file - promoters50/2025306
aaacaag

SEQ ID NO: 179295 - DNA, 12 bp, Unknown
  misc_feature (1)..( 12): Result.005 file - promoters50/2025592
caattaatattt

SEQ ID NO: 179296 - DNA, 12 bp, Unknown
  misc_feature (1)..( 12): Result.005 file - promoters50/2025592
caaataatattc

SEQ ID NO: 179297 - DNA, 12 bp, Unknown
  misc_feature (1)..( 12): Result.005 file - promoters50/2025592
tcagtaatgttt

SEQ ID NO: 179298 - DNA, 10 bp, Unknown
  misc_feature (1)..( 10): Result.005 file - promoters50/2025592
tttgttgtga

SEQ ID NO: 179299 - DNA, 10 bp, Unknown
  misc_feature (1)..( 10): Result.005 file - promoters50/2025592
gaagttttga

SEQ ID NO: 179300 - DNA, 10 bp, Unknown
  misc_feature (1)..( 10): Result.005 file - promoters50/2025592
ttttttttgt

SEQ ID NO: 179301 - DNA, 8 bp, Unknown
  misc_feature (1)..( 8): Result.005 file - promoters50/2025592
ataataaa

SEQ ID NO: 179302 - DNA, 8 bp, Unknown
  misc_feature (1)..( 8): Result.005 file - promoters50/2025592
ataaaaaa

SEQ ID NO: 179303 - DNA, 9 bp, Unknown
  misc_feature (1)..( 9): Result.005 file - promoters50/2025592
tcaaacaaa

SEQ ID NO: 179304 - DNA, 9 bp, Unknown
  misc_feature (1)..( 9): Result.005 file - promoters50/2025592
ccaatcaaa

SEQ ID NO: 179305 - DNA, 7 bp, Unknown
  misc_feature (1)..( 7): Result.005 file - promoters50/2025592
acatttc

SEQ ID NO: 179306 - DNA, 7 bp, Unknown
  misc_feature (1)..( 7): Result.005 file - promoters50/2025592
ccatttc

SEQ ID NO: 179307 - DNA, 7 bp, Unknown
  misc_feature (1)..( 7): Result.005 file - promoters50/2025592
ccatttt

SEQ ID NO: 179308 - DNA, 9 bp, Unknown
  misc_feature (1)..( 9): Result.005 file - promoters50/2025592
aattatcat

SEQ ID NO: 179309 - DNA, 9 bp, Unknown
  misc_feature (1)..( 9): Result.005 file - promoters50/2025592
tactatcat

SEQ ID NO: 179310 - DNA, 9 bp, Unknown
  misc_feature (1)..( 9): Result.005 file - promoters50/2025592
tacaatcat

SEQ ID NO: 179311 - DNA, 9 bp, Unknown
  misc_feature (1)..( 9): Result.005 file - promoters50/2025627
atttttttc

SEQ ID NO: 179312 - DNA, 9 bp, Unknown
  misc_feature (1)..( 9): Result.005 file - promoters50/2025627
cttttgttc

SEQ ID NO: 179313 - DNA, 9 bp, Unknown
  misc_feature (1)..( 9): Result.005 file - promoters50/2025627
atttattta

SEQ ID NO: 179314 - DNA, 9 bp, Unknown
  misc_feature (1)..( 9): Result.005 file - promoters50/2025627
attgtttta

SEQ ID NO: 179315 - DNA, 9 bp, Unknown
  misc_feature (1)..( 9): Result.005 file - promoters50/2025627
attaaaaaa

SEQ ID NO: 179316 - DNA, 9 bp, Unknown
  misc_feature (1)..( 9): Result.005 file - promoters50/2025627
aataataaa

SEQ ID NO: 179317 - DNA, 9 bp, Unknown
  misc_feature (1)..( 9): Result.005 file - promoters50/2025627
attagaaat

SEQ ID NO: 179318 - DNA, 10 bp, Unknown
  misc_feature (1)..( 10): Result.005 file - promoters50/2025627
gaatattacg

SEQ ID NO: 179319 - DNA, 10 bp, Unknown
  misc_feature (1)..( 10): Result.005 file - promoters50/2025627
taatattttt

SEQ ID NO: 179320 - DNA, 10 bp, Unknown
  misc_feature (1)..( 10): Result.005 file - promoters50/2025627
taattttttt

SEQ ID NO: 179321 - DNA, 8 bp, Unknown
  misc_feature (1)..( 8): Result.005 file - promoters50/2025627
ccaaaact

SEQ ID NO: 179322 - DNA, 8 bp, Unknown
  misc_feature (1)..( 8): Result.005 file - promoters50/2025627
ttaaaact

SEQ ID NO: 179323 - DNA, 8 bp, Unknown
  misc_feature (1)..( 8): Result.005 file - promoters50/2025627
ttaaaaca

SEQ ID NO: 179324 - DNA, 7 bp, Unknown
  misc_feature (1)..( 7): Result.005 file - promoters50/2026177
ttttata

SEQ ID NO: 179325 - DNA, 7 bp, Unknown
  misc_feature (1)..( 7): Result.005 file - promoters50/2026177
ttttatt

SEQ ID NO: 179326 - DNA, 7 bp, Unknown
  misc_feature (1)..( 7): Result.005 file - promoters50/2026177
atttata

SEQ ID NO: 179327 - DNA, 7 bp, Unknown
  misc_feature (1)..( 7): Result.005 file - promoters50/2026177
aaaataa

SEQ ID NO: 179328 - DNA, 7 bp, Unknown
  misc_feature (1)..( 7): Result.005 file - promoters50/2026177
taaataa

SEQ ID NO: 179329 - DNA, 8 bp, Unknown
  misc_feature (1)..( 8): Result.005 file - promoters50/2026177
caaactaa

SEQ ID NO: 179330 - DNA, 7 bp, Unknown
  misc_feature (1)..( 7): Result.005 file - promoters50/2026177
ttgtttg

SEQ ID NO: 179331 - DNA, 7 bp, Unknown
  misc_feature (1)..( 7): Result.005 file - promoters50/2026177
ttgtttt

SEQ ID NO: 179332 - DNA, 8 bp, Unknown
  misc_feature (1)..( 8): Result.005 file - promoters50/2026177
gtgtattg

SEQ ID NO: 179333 - DNA, 8 bp, Unknown
  misc_feature (1)..( 8): Result.005 file - promoters50/2026177
aaaattta

SEQ ID NO: 179334 - DNA, 8 bp, Unknown
  misc_feature (1)..( 8): Result.005 file - promoters50/2026177
aaaatttc

SEQ ID NO: 179335 - DNA, 8 bp, Unknown
  misc_feature (1)..( 8): Result.005 file - promoters50/2026177
aaaattcc

SEQ ID NO: 179336 - DNA, 8 bp, Unknown
  misc_feature (1)..( 8): Result.005 file - promoters50/2026177
aaagttct

SEQ ID NO: 179337 - DNA, 8 bp, Unknown
  misc_feature (1)..( 8): Result.005 file - promoters50/2026177
aaaatcaa

SEQ ID NO: 179338 - DNA, 8 bp, Unknown
  misc_feature (1)..( 8): Result.005 file - promoters50/2026177
aaaatcaa

SEQ ID NO: 179339 - DNA, 8 bp, Unknown
  misc_feature (1)..( 8): Result.005 file - promoters50/2026177
aaagtcac

SEQ ID NO: 179340 - DNA, 7 bp, Unknown
  misc_feature (1)..( 7): Result.005 file - promoters50/2026177
ttcatct

SEQ ID NO: 179341 - DNA, 7 bp, Unknown
  misc_feature (1)..( 7): Result.005 file - promoters50/2026177
ttcctct

SEQ ID NO: 179342 - DNA, 7 bp, Unknown
  misc_feature (1)..( 7): Result.005 file - promoters50/2026177
ttcttct

SEQ ID NO: 179343 - DNA, 11 bp, Unknown
  misc_feature (1)..( 11): Result.005 file - promoters50/2026721
caccttttaga

SEQ ID NO: 179344 - DNA, 11 bp, Unknown
  misc_feature (1)..( 11): Result.005 file - promoters50/2026721
ttgcttttaga

SEQ ID NO: 179345 - DNA, 11 bp, Unknown
  misc_feature (1)..( 11): Result.005 file - promoters50/2026721
ctgcttttatc

SEQ ID NO: 179346 - DNA, 11 bp, Unknown
  misc_feature (1)..( 11): Result.005 file - promoters50/2026721
ttgcgtttgtg

SEQ ID NO: 179347 - DNA, 8 bp, Unknown
  misc_feature (1)..( 8): Result.005 file - promoters50/2026721
tttttatt

SEQ ID NO: 179348 - DNA, 8 bp, Unknown
  misc_feature (1)..( 8): Result.005 file - promoters50/2026721
tttttaac

SEQ ID NO: 179349 - DNA, 8 bp, Unknown
  misc_feature (1)..( 8): Result.005 file - promoters50/2026721
tttttatt

SEQ ID NO: 179350 - DNA, 8 bp, Unknown
  misc_feature (1)..( 8): Result.005 file - promoters50/2026721
tttctaac

SEQ ID NO: 179351 - DNA, 10 bp, Unknown
  misc_feature (1)..( 10): Result.005 file - promoters50/2026757
aagaggattg

SEQ ID NO: 179352 - DNA, 10 bp, Unknown
  misc_feature (1)..( 10): Result.005 file - promoters50/2026757
aagatgatgt

SEQ ID NO: 179353 - DNA, 10 bp, Unknown
  misc_feature (1)..( 10): Result.005 file - promoters50/2026757
gagaggcttg

SEQ ID NO: 179354 - DNA, 9 bp, Unknown
  misc_feature (1)..( 9): Result.005 file - promoters50/2026757
aaaaaggcc

SEQ ID NO: 179355 - DNA, 9 bp, Unknown
  misc_feature (1)..( 9): Result.005 file - promoters50/2026757
aaaaagagt

SEQ ID NO: 179356 - DNA, 9 bp, Unknown
  misc_feature (1)..( 9): Result.005 file - promoters50/2026757
ttaaaggag

SEQ ID NO: 179357 - DNA, 14 bp, Unknown
  misc_feature (1)..( 14): Result.005 file - promoters50/2026771
aataacattaaaaa

SEQ ID NO: 179358 - DNA, 14 bp, Unknown
  misc_feature (1)..( 14): Result.005 file - promoters50/2026771
tcctttattaaatt

SEQ ID NO: 179359 - DNA, 14 bp, Unknown
  misc_feature (1)..( 14): Result.005 file - promoters50/2026771
tatgtgattaaata

SEQ ID NO: 179360 - DNA, 15 bp, Unknown
  misc_feature (1)..( 15): Result.005 file - promoters50/2026771
caagattttagaaaa

SEQ ID NO: 179361 - DNA, 15 bp, Unknown
  misc_feature (1)..( 15): Result.005 file - promoters50/2026771
attgtaattagaaaa

SEQ ID NO: 179362 - DNA, 15 bp, Unknown
  misc_feature (1)..( 15): Result.005 file - promoters50/2026771
ctaacgtttatatat

SEQ ID NO: 179363 - DNA, 15 bp, Unknown
  misc_feature (1)..( 15): Result.005 file - promoters50/2026771
aacctttttataatc

SEQ ID NO: 179364 - DNA, 12 bp, Unknown
  misc_feature (1)..( 12): Result.005 file - promoters50/2026771
tgtaaataaata

SEQ ID NO: 179365 - DNA, 12 bp, Unknown
  misc_feature (1)..( 12): Result.005 file - promoters50/2026771
tgtgattaaata

SEQ ID NO: 179366 - DNA, 12 bp, Unknown
  misc_feature (1)..( 12): Result.005 file - promoters50/2026771
cgtttatatata

SEQ ID NO: 179367 - DNA, 12 bp, Unknown
  misc_feature (1)..( 12): Result.005 file - promoters50/2026771
tcttgataaata

SEQ ID NO: 179368 - DNA, 12 bp, Unknown
  misc_feature (1)..( 12): Result.005 file - promoters50/2026771
gacttttacata

SEQ ID NO: 179369 - DNA, 12 bp, Unknown
  misc_feature (1)..( 12): Result.005 file - promoters50/2026771
aacctttttata

SEQ ID NO: 179370 - DNA, 9 bp, Unknown
  misc_feature (1)..( 9): Result.005 file - promoters50/2027233
agtttaagg

SEQ ID NO: 179371 - DNA, 9 bp, Unknown
  misc_feature (1)..( 9): Result.005 file - promoters50/2027233
ggttcaagg

SEQ ID NO: 179372 - DNA, 9 bp, Unknown
  misc_feature (1)..( 9): Result.005 file - promoters50/2027233
cttttaagc

SEQ ID NO: 179373 - DNA, 9 bp, Unknown
  misc_feature (1)..( 9): Result.005 file - promoters50/2027233
agtttgagg

SEQ ID NO: 179374 - DNA, 9 bp, Unknown
  misc_feature (1)..( 9): Result.005 file - promoters50/2027233
agtttggcc

SEQ ID NO: 179375 - DNA, 7 bp, Unknown
  misc_feature (1)..( 7): Result.005 file - promoters50/2027242
aaatctt

SEQ ID NO: 179376 - DNA, 7 bp, Unknown
  misc_feature (1)..( 7): Result.005 file - promoters50/2027242
gaatctt

SEQ ID NO: 179377 - DNA, 7 bp, Unknown
  misc_feature (1)..( 7): Result.005 file - promoters50/2027242
gaatctc

SEQ ID NO: 179378 - DNA, 14 bp, Unknown
  misc_feature (1)..( 14): Result.005 file - promoters50/2027242
gaaatggtaaaaag

SEQ ID NO: 179379 - DNA, 14 bp, Unknown
  misc_feature (1)..( 14): Result.005 file - promoters50/2027242
gaaatgtattttgt

SEQ ID NO: 179380 - DNA, 14 bp, Unknown
  misc_feature (1)..( 14): Result.005 file - promoters50/2027242
aaaagggtcaaaag

SEQ ID NO: 179381 - DNA, 14 bp, Unknown
  misc_feature (1)..( 14): Result.005 file - promoters50/2027253
atttaaaatataga

SEQ ID NO: 179382 - DNA, 14 bp, Unknown
  misc_feature (1)..( 14): Result.005 file - promoters50/2027253
tttttaaattttcg

SEQ ID NO: 179383 - DNA, 14 bp, Unknown
  misc_feature (1)..( 14): Result.005 file - promoters50/2027253
atccaaaattatag

SEQ ID NO: 179384 - DNA, 14 bp, Unknown
  misc_feature (1)..( 14): Result.005 file - promoters50/2027253
tagtaagattctag

SEQ ID NO: 179385 - DNA, 14 bp, Unknown
  misc_feature (1)..( 14): Result.005 file - promoters50/2027253
tttttatatatttt

SEQ ID NO: 179386 - DNA, 14 bp, Unknown
  misc_feature (1)..( 14): Result.005 file - promoters50/2027253
gccctatattataa

SEQ ID NO: 179387 - DNA, 17 bp, Unknown
  misc_feature (1)..( 17): Result.005 file - promoters50/2027253
aaaagaaaatattgggg

SEQ ID NO: 179388 - DNA, 17 bp, Unknown
  misc_feature (1)..( 17): Result.005 file - promoters50/2027253
aaaacaaaatcataaag

SEQ ID NO: 179389 - DNA, 17 bp, Unknown
  misc_feature (1)..( 17): Result.005 file - promoters50/2027253
aaaaaattgaaacttta

SEQ ID NO: 179390 - DNA, 17 bp, Unknown
  misc_feature (1)..( 17): Result.005 file - promoters50/2027253
atataattgcaacctta

SEQ ID NO: 179391 - DNA, 17 bp, Unknown
  misc_feature (1)..( 17): Result.005 file - promoters50/2027253
agaccattgcagatgcc

SEQ ID NO: 179392 - DNA, 17 bp, Unknown
  misc_feature (1)..( 17): Result.005 file - promoters50/2027253
aaaagaaaaagaaaaaa

SEQ ID NO: 179393 - DNA, 11 bp, Unknown
  misc_feature (1)..( 11): Result.005 file - promoters50/2027268
atctgctaatg

SEQ ID NO: 179394 - DNA, 11 bp, Unknown
  misc_feature (1)..( 11): Result.005 file - promoters50/2027268
ttttgctaaaa

SEQ ID NO: 179395 - DNA, 11 bp, Unknown
  misc_feature (1)..( 11): Result.005 file - promoters50/2027268
tttttctaaaa

SEQ ID NO: 179396 - DNA, 9 bp, Unknown
  misc_feature (1)..( 9): Result.005 file - promoters50/2028939
gatcacact

SEQ ID NO: 179397 - DNA, 9 bp, Unknown
  misc_feature (1)..( 9): Result.005 file - promoters50/2028939
catctcact

SEQ ID NO: 179398 - DNA, 9 bp, Unknown
  misc_feature (1)..( 9): Result.005 file - promoters50/2028939
catctctga

SEQ ID NO: 179399 - DNA, 7 bp, Unknown
  misc_feature (1)..( 7): Result.005 file - promoters50/2028939
gttttga

SEQ ID NO: 179400 - DNA, 7 bp, Unknown
  misc_feature (1)..( 7): Result.005 file - promoters50/2028939
cttttga

SEQ ID NO: 179401 - DNA, 7 bp, Unknown
  misc_feature (1)..( 7): Result.005 file - promoters50/2028939
cttttgt

SEQ ID NO: 179402 - DNA, 8 bp, Unknown
  misc_feature (1)..( 8): Result.005 file - promoters50/2028939
aattctat

SEQ ID NO: 179403 - DNA, 8 bp, Unknown
  misc_feature (1)..( 8): Result.005 file - promoters50/2028939
tgttctat

SEQ ID NO: 179404 - DNA, 8 bp, Unknown
  misc_feature (1)..( 8): Result.005 file - promoters50/2028939
tgtgctac

SEQ ID NO: 179405 - DNA, 8 bp, Unknown
  misc_feature (1)..( 8): Result.005 file - promoters50/2028939
acactttt

SEQ ID NO: 179406 - DNA, 8 bp, Unknown
  misc_feature (1)..( 8): Result.005 file - promoters50/2028939
acaccttt

SEQ ID NO: 179407 - DNA, 8 bp, Unknown
  misc_feature (1)..( 8): Result.005 file - promoters50/2028939
taactttt

SEQ ID NO: 179408 - DNA, 8 bp, Unknown
  misc_feature (1)..( 8): Result.005 file - promoters50/2028939
gtctttat

SEQ ID NO: 179409 - DNA, 8 bp, Unknown
  misc_feature (1)..( 8): Result.005 file - promoters50/2028939
atctgtat

SEQ ID NO: 179410 - DNA, 8 bp, Unknown
  misc_feature (1)..( 8): Result.005 file - promoters50/2028939
atctgttg

SEQ ID NO: 179411 - DNA, 6 bp, Unknown
  misc_feature (1)..( 6): Result.005 file - promoters50/2028939
agtttt

SEQ ID NO: 179412 - DNA, 6 bp, Unknown
  misc_feature (1)..( 6): Result.005 file - promoters50/2028939
agtttt

SEQ ID NO: 179413 - DNA, 6 bp, Unknown
  misc_feature (1)..( 6): Result.005 file - promoters50/2028939
agtttt

SEQ ID NO: 179414 - DNA, 9 bp, Unknown
  misc_feature (1)..( 9): Result.005 file - promoters50/2028939
tgtgtcaga

SEQ ID NO: 179415 - DNA, 9 bp, Unknown
  misc_feature (1)..( 9): Result.005 file - promoters50/2028939
tgtttcaaa

SEQ ID NO: 179416 - DNA, 9 bp, Unknown
  misc_feature (1)..( 9): Result.005 file - promoters50/2028939
ctttttaaa

SEQ ID NO: 179417 - DNA, 8 bp, Unknown
  misc_feature (1)..( 8): Result.005 file - promoters50/2028939
atgcgctt

SEQ ID NO: 179418 - DNA, 8 bp, Unknown
  misc_feature (1)..( 8): Result.005 file - promoters50/2028939
atgtgcta

SEQ ID NO: 179419 - DNA, 8 bp, Unknown
  misc_feature (1)..( 8): Result.005 file - promoters50/2028939
ctgttcta

SEQ ID NO: 179420 - DNA, 7 bp, Unknown
  misc_feature (1)..( 7): Result.005 file - promoters50/2028945
ttgaaat

SEQ ID NO: 179421 - DNA, 7 bp, Unknown
  misc_feature (1)..( 7): Result.005 file - promoters50/2028945
ttgaaat

SEQ ID NO: 179422 - DNA, 7 bp, Unknown
  misc_feature (1)..( 7): Result.005 file - promoters50/2028945
ctgaaat

SEQ ID NO: 179423 - DNA, 13 bp, Unknown
  misc_feature (1)..( 13): Result.005 file - promoters50/2028945
taaatatttaaat

SEQ ID NO: 179424 - DNA, 13 bp, Unknown
  misc_feature (1)..( 13): Result.005 file - promoters50/2028945
taaaaatttaaat

SEQ ID NO: 179425 - DNA, 13 bp, Unknown
  misc_feature (1)..( 13): Result.005 file - promoters50/2028945
agcagttttaaaa

SEQ ID NO: 179426 - DNA, 9 bp, Unknown
  misc_feature (1)..( 9): Result.005 file - promoters50/2028945
cataaacta

SEQ ID NO: 179427 - DNA, 9 bp, Unknown
  misc_feature (1)..( 9): Result.005 file - promoters50/2028945
cataaaaat

SEQ ID NO: 179428 - DNA, 9 bp, Unknown
  misc_feature (1)..( 9): Result.005 file - promoters50/2028945
catacacta

SEQ ID NO: 179429 - DNA, 8 bp, Unknown
  misc_feature (1)..( 8): Result.005 file - promoters50/2028945
attatttt

SEQ ID NO: 179430 - DNA, 8 bp, Unknown
  misc_feature (1)..( 8): Result.005 file - promoters50/2028945
tttaattt

SEQ ID NO: 179431 - DNA, 8 bp, Unknown
  misc_feature (1)..( 8): Result.005 file - promoters50/2028945
tttaattt

SEQ ID NO: 179432 - DNA, 7 bp, Unknown
  misc_feature (1)..( 7): Result.005 file - promoters50/2028945
ttttaaa

SEQ ID NO: 179433 - DNA, 7 bp, Unknown
  misc_feature (1)..( 7): Result.005 file - promoters50/2028945
ttttaaa

SEQ ID NO: 179434 - DNA, 7 bp, Unknown
  misc_feature (1)..( 7): Result.005 file - promoters50/2028945
atttaaa

SEQ ID NO: 179435 - DNA, 8 bp, Unknown
  misc_feature (1)..( 8): Result.005 file - promoters50/2028945
atcataat

SEQ ID NO: 179436 - DNA, 8 bp, Unknown
  misc_feature (1)..( 8): Result.005 file - promoters50/2028945
atcttaat

SEQ ID NO: 179437 - DNA, 8 bp, Unknown
  misc_feature (1)..( 8): Result.005 file - promoters50/2028945
ctctcaat

SEQ ID NO: 179438 - DNA, 9 bp, Unknown
  misc_feature (1)..( 9): Result.005 file - promoters50/2028945
tctaagtta

SEQ ID NO: 179439 - DNA, 9 bp, Unknown
  misc_feature (1)..( 9): Result.005 file - promoters50/2028945
tttaattta

SEQ ID NO: 179440 - DNA, 9 bp, Unknown
  misc_feature (1)..( 9): Result.005 file - promoters50/2028945
tttaatttc

SEQ ID NO: 179441 - DNA, 8 bp, Unknown
  misc_feature (1)..( 8): Result.005 file - promoters50/2028945
gaacttta

SEQ ID NO: 179442 - DNA, 8 bp, Unknown
  misc_feature (1)..( 8): Result.005 file - promoters50/2028945
aaacatta

SEQ ID NO: 179443 - DNA, 8 bp, Unknown
  misc_feature (1)..( 8): Result.005 file - promoters50/2028945
aaaaatta

SEQ ID NO: 179444 - DNA, 9 bp, Unknown
  misc_feature (1)..( 9): Result.005 file - promoters50/2028948
agtaaaaac

SEQ ID NO: 179445 - DNA, 9 bp, Unknown
  misc_feature (1)..( 9): Result.005 file - promoters50/2028948
agtaaaaca

SEQ ID NO: 179446 - DNA, 9 bp, Unknown
  misc_feature (1)..( 9): Result.005 file - promoters50/2028948
cataaaaca

SEQ ID NO: 179447 - DNA, 9 bp, Unknown
  misc_feature (1)..( 9): Result.005 file - promoters50/2028948
catagtaaa

SEQ ID NO: 179448 - DNA, 9 bp, Unknown
  misc_feature (1)..( 9): Result.005 file - promoters50/2028948
cataataat

SEQ ID NO: 179449 - DNA, 9 bp, Unknown
  misc_feature (1)..( 9): Result.005 file - promoters50/2028948
tggaataat

SEQ ID NO: 179450 - DNA, 11 bp, Unknown
  misc_feature (1)..( 11): Result.005 file - promoters50/2028948
atcttacaaaa

SEQ ID NO: 179451 - DNA, 11 bp, Unknown
  misc_feature (1)..( 11): Result.005 file - promoters50/2028948
tttatacaaaa

SEQ ID NO: 179452 - DNA, 11 bp, Unknown
  misc_feature (1)..( 11): Result.005 file - promoters50/2028948
tttatgcaaag

SEQ ID NO: 179453 - DNA, 9 bp, Unknown
  misc_feature (1)..( 9): Result.005 file - promoters50/2028979
attatataa

SEQ ID NO: 179454 - DNA, 9 bp, Unknown
  misc_feature (1)..( 9): Result.005 file - promoters50/2028979
aatatataa

SEQ ID NO: 179455 - DNA, 9 bp, Unknown
  misc_feature (1)..( 9): Result.005 file - promoters50/2028979
attttatac

SEQ ID NO: 179456 - DNA, 8 bp, Unknown
  misc_feature (1)..( 8): Result.005 file - promoters50/2028979
ttaaaaat

SEQ ID NO: 179457 - DNA, 8 bp, Unknown
  misc_feature (1)..( 8): Result.005 file - promoters50/2028979
ttaaaaag

SEQ ID NO: 179458 - DNA, 8 bp, Unknown
  misc_feature (1)..( 8): Result.005 file - promoters50/2028979
gaaaaaat

SEQ ID NO: 179459 - DNA, 8 bp, Unknown
  misc_feature (1)..( 8): Result.005 file - promoters50/2028979
aactaaga

SEQ ID NO: 179460 - DNA, 8 bp, Unknown
  misc_feature (1)..( 8): Result.005 file - promoters50/2028979
aactaata

SEQ ID NO: 179461 - DNA, 8 bp, Unknown
  misc_feature (1)..( 8): Result.005 file - promoters50/2028979
aacaaata

SEQ ID NO: 179462 - DNA, 9 bp, Unknown
  misc_feature (1)..( 9): Result.005 file - promoters50/2028993
tatatacca

SEQ ID NO: 179463 - DNA, 9 bp, Unknown
  misc_feature (1)..( 9): Result.005 file - promoters50/2028993
cataaacca

SEQ ID NO: 179464 - DNA, 9 bp, Unknown
  misc_feature (1)..( 9): Result.005 file - promoters50/2028993
cataaataa

SEQ ID NO: 179465 - DNA, 9 bp, Unknown
  misc_feature (1)..( 9): Result.005 file - promoters50/2028993
cttaaccaa

SEQ ID NO: 179466 - DNA, 9 bp, Unknown
  misc_feature (1)..( 9): Result.005 file - promoters50/2028993
attaaccaa

SEQ ID NO: 179467 - DNA, 9 bp, Unknown
  misc_feature (1)..( 9): Result.005 file - promoters50/2028993
attcacctc

SEQ ID NO: 179468 - DNA, 12 bp, Unknown
  misc_feature (1)..( 12): Result.005 file - promoters50/2028993
aatagaaattta

SEQ ID NO: 179469 - DNA, 12 bp, Unknown
  misc_feature (1)..( 12): Result.005 file - promoters50/2028993
ttactaaaatta

SEQ ID NO: 179470 - DNA, 12 bp, Unknown
  misc_feature (1)..( 12): Result.005 file - promoters50/2028993
ttactaaaatat

SEQ ID NO: 179471 - DNA, 9 bp, Unknown
  misc_feature (1)..( 9): Result.005 file - promoters50/2028997
cttctatgt

SEQ ID NO: 179472 - DNA, 9 bp, Unknown
  misc_feature (1)..( 9): Result.005 file - promoters50/2028997
cttgtataa

SEQ ID NO: 179473 - DNA, 9 bp, Unknown
  misc_feature (1)..( 9): Result.005 file - promoters50/2028997
cgtctatgt

SEQ ID NO: 179474 - DNA, 11 bp, Unknown
  misc_feature (1)..( 11): Result.005 file - promoters50/2028997
agatttcattg

SEQ ID NO: 179475 - DNA, 11 bp, Unknown
  misc_feature (1)..( 11): Result.005 file - promoters50/2028997
tactttgatta

SEQ ID NO: 179476 - DNA, 11 bp, Unknown
  misc_feature (1)..( 11): Result.005 file - promoters50/2028997
aactttaatta

SEQ ID NO: 179477 - DNA, 12 bp, Unknown
  misc_feature (1)..( 12): Result.005 file - promoters50/2028997
cagcttaagttt

SEQ ID NO: 179478 - DNA, 13 bp, Unknown
  misc_feature (1)..( 13): Result.005 file - promoters50/2028997
tctaatgttcttt

SEQ ID NO: 179479 - DNA, 13 bp, Unknown
  misc_feature (1)..( 13): Result.005 file - promoters50/2028997
gcttaagtttttt

SEQ ID NO: 179480 - DNA, 13 bp, Unknown
  misc_feature (1)..( 13): Result.005 file - promoters50/2028997
cttaaatttgttt

SEQ ID NO: 179481 - DNA, 8 bp, Unknown
  misc_feature (1)..( 8): Result.005 file - promoters50/2029009
ttttaaaa

SEQ ID NO: 179482 - DNA, 8 bp, Unknown
  misc_feature (1)..( 8): Result.005 file - promoters50/2029009
acttaaaa

SEQ ID NO: 179483 - DNA, 8 bp, Unknown
  misc_feature (1)..( 8): Result.005 file - promoters50/2029009
actgaaat

SEQ ID NO: 179484 - DNA, 9 bp, Unknown
  misc_feature (1)..( 9): Result.005 file - promoters50/2029016
agtaaatca

SEQ ID NO: 179485 - DNA, 9 bp, Unknown
  misc_feature (1)..( 9): Result.005 file - promoters50/2029016
ttaaaatca

SEQ ID NO: 179486 - DNA, 9 bp, Unknown
  misc_feature (1)..( 9): Result.005 file - promoters50/2029016
aataaattg

SEQ ID NO: 179487 - DNA, 9 bp, Unknown
  misc_feature (1)..( 9): Result.005 file - promoters50/2029016
attaaatca

SEQ ID NO: 179488 - DNA, 8 bp, Unknown
  misc_feature (1)..( 8): Result.005 file - promoters50/2029027
ccccaatt

SEQ ID NO: 179489 - DNA, 8 bp, Unknown
  misc_feature (1)..( 8): Result.005 file - promoters50/2029027
cccccatt

SEQ ID NO: 179490 - DNA, 8 bp, Unknown
  misc_feature (1)..( 8): Result.005 file - promoters50/2029027
gtccaatt

SEQ ID NO: 179491 - DNA, 9 bp, Unknown
  misc_feature (1)..( 9): Result.005 file - promoters50/2029027
aaccttttt

SEQ ID NO: 179492 - DNA, 9 bp, Unknown
  misc_feature (1)..( 9): Result.005 file - promoters50/2029027
aacattttg

SEQ ID NO: 179493 - DNA, 10 bp, Unknown
  misc_feature (1)..( 10): Result.005 file - promoters50/2029027
tttcttgttt

SEQ ID NO: 179494 - DNA, 15 bp, Unknown
  misc_feature (1)..( 15): Result.005 file - promoters50/2029033
ttcatttatttactt

SEQ ID NO: 179495 - DNA, 15 bp, Unknown
  misc_feature (1)..( 15): Result.005 file - promoters50/2029033
gctatttatttcctt

SEQ ID NO: 179496 - DNA, 15 bp, Unknown
  misc_feature (1)..( 15): Result.005 file - promoters50/2029033
atgatttatttttta

SEQ ID NO: 179497 - DNA, 15 bp, Unknown
  misc_feature (1)..( 15): Result.005 file - promoters50/2029033
ttggattctttccta

SEQ ID NO: 179498 - DNA, 15 bp, Unknown
  misc_feature (1)..( 15): Result.005 file - promoters50/2029033
gctttttatccacat

SEQ ID NO: 179499 - DNA, 15 bp, Unknown
  misc_feature (1)..( 15): Result.005 file - promoters50/2029033
tcacggctttttcta

SEQ ID NO: 179500 - DNA, 15 bp, Unknown
  misc_feature (1)..( 15): Result.005 file - promoters50/2029033
gaaacatattttcga

SEQ ID NO: 179501 - DNA, 11 bp, Unknown
  misc_feature (1)..( 11): Result.005 file - promoters50/2029033
ctttctataat

SEQ ID NO: 179502 - DNA, 11 bp, Unknown
  misc_feature (1)..( 11): Result.005 file - promoters50/2029033
atttttattct

SEQ ID NO: 179503 - DNA, 11 bp, Unknown
  misc_feature (1)..( 11): Result.005 file - promoters50/2029033
tattctatttg

SEQ ID NO: 179504 - DNA, 11 bp, Unknown
  misc_feature (1)..( 11): Result.005 file - promoters50/2029033
ttttcgataat

SEQ ID NO: 179505 - DNA, 11 bp, Unknown
  misc_feature (1)..( 11): Result.005 file - promoters50/2029033
attttttataa

SEQ ID NO: 179506 - DNA, 11 bp, Unknown
  misc_feature (1)..( 11): Result.005 file - promoters50/2029033
ctttttatcca

SEQ ID NO: 179507 - DNA, 11 bp, Unknown
  misc_feature (1)..( 11): Result.005 file - promoters50/2029033
ctttggatctt

SEQ ID NO: 179508 - DNA, 10 bp, Unknown
  misc_feature (1)..( 10): Result.005 file - promoters50/2029033
aaaatatata

SEQ ID NO: 179509 - DNA, 10 bp, Unknown
  misc_feature (1)..( 10): Result.005 file - promoters50/2029033
tgtatatatt

SEQ ID NO: 179510 - DNA, 10 bp, Unknown
  misc_feature (1)..( 10): Result.005 file - promoters50/2029033
aaattataaa

SEQ ID NO: 179511 - DNA, 10 bp, Unknown
  misc_feature (1)..( 10): Result.005 file - promoters50/2029033
cgaataaata

SEQ ID NO: 179512 - DNA, 10 bp, Unknown
  misc_feature (1)..( 10): Result.005 file - promoters50/2029033
taattaacct

SEQ ID NO: 179513 - DNA, 10 bp, Unknown
  misc_feature (1)..( 10): Result.005 file - promoters50/2029033
ccaatgaatt

SEQ ID NO: 179514 - DNA, 18 bp, Unknown
  misc_feature (1)..( 18): Result.005 file - promoters50/2029033
tatttataaccaaatcct

SEQ ID NO: 179515 - DNA, 18 bp, Unknown
  misc_feature (1)..( 18): Result.005 file - promoters50/2029033
tatatataatcttctcag

SEQ ID NO: 179516 - DNA, 18 bp, Unknown
  misc_feature (1)..( 18): Result.005 file - promoters50/2029033
gctttataaacacatctc

SEQ ID NO: 179517 - DNA, 18 bp, Unknown
  misc_feature (1)..( 18): Result.005 file - promoters50/2029033
gagatataatacagacaa

SEQ ID NO: 179518 - DNA, 18 bp, Unknown
  misc_feature (1)..( 18): Result.005 file - promoters50/2029033
cctctataaagacaaaca

SEQ ID NO: 179519 - DNA, 18 bp, Unknown
  misc_feature (1)..( 18): Result.005 file - promoters50/2029033
attaaataaatactcttc

SEQ ID NO: 179520 - DNA, 18 bp, Unknown
  misc_feature (1)..( 18): Result.005 file - promoters50/2029033
tttatattctcattcact

SEQ ID NO: 179521 - DNA, 18 bp, Unknown
  misc_feature (1)..( 18): Result.005 file - promoters50/2029033
ttcttattcttctatcaa

SEQ ID NO: 179522 - DNA, 10 bp, Unknown
  misc_feature (1)..( 10): Result.005 file - promoters50/2029041
gaaattatgg

SEQ ID NO: 179523 - DNA, 10 bp, Unknown
  misc_feature (1)..( 10): Result.005 file - promoters50/2029041
gaaattacta

SEQ ID NO: 179524 - DNA, 10 bp, Unknown
  misc_feature (1)..( 10): Result.005 file - promoters50/2029041
ttaattacta

SEQ ID NO: 179525 - DNA, 10 bp, Unknown
  misc_feature (1)..( 10): Result.005 file - promoters50/2029041
aaatacccaa

SEQ ID NO: 179526 - DNA, 10 bp, Unknown
  misc_feature (1)..( 10): Result.005 file - promoters50/2029041
caataaccaa

SEQ ID NO: 179527 - DNA, 10 bp, Unknown
  misc_feature (1)..( 10): Result.005 file - promoters50/2029041
taattactaa

SEQ ID NO: 179528 - DNA, 7 bp, Unknown
  misc_feature (1)..( 7): Result.005 file - promoters50/2029041
agttttg

SEQ ID NO: 179529 - DNA, 7 bp, Unknown
  misc_feature (1)..( 7): Result.005 file - promoters50/2029041
agttttt

SEQ ID NO: 179530 - DNA, 7 bp, Unknown
  misc_feature (1)..( 7): Result.005 file - promoters50/2029041
tgttttg

SEQ ID NO: 179531 - DNA, 7 bp, Unknown
  misc_feature (1)..( 7): Result.005 file - promoters50/2029054
ctaccaa

SEQ ID NO: 179532 - DNA, 7 bp, Unknown
  misc_feature (1)..( 7): Result.005 file - promoters50/2029054
ataccaa

SEQ ID NO: 179533 - DNA, 7 bp, Unknown
  misc_feature (1)..( 7): Result.005 file - promoters50/2029054
atagcaa

SEQ ID NO: 179534 - DNA, 7 bp, Unknown
  misc_feature (1)..( 7): Result.005 file - promoters50/2029075
caataag

SEQ ID NO: 179535 - DNA, 7 bp, Unknown
  misc_feature (1)..( 7): Result.005 file - promoters50/2029075
aaataag

SEQ ID NO: 179536 - DNA, 7 bp, Unknown
  misc_feature (1)..( 7): Result.005 file - promoters50/2029075
aaataaa

SEQ ID NO: 179537 - DNA, 7 bp, Unknown
  misc_feature (1)..( 7): Result.005 file - promoters50/2029075
aaataaa

SEQ ID NO: 179538 - DNA, 8 bp, Unknown
  misc_feature (1)..( 8): Result.005 file - promoters50/2029075
aaagtaat

SEQ ID NO: 179539 - DNA, 8 bp, Unknown
  misc_feature (1)..( 8): Result.005 file - promoters50/2029075
aaaaaaag

SEQ ID NO: 179540 - DNA, 8 bp, Unknown
  misc_feature (1)..( 8): Result.005 file - promoters50/2029075
gaagcaat

SEQ ID NO: 179541 - DNA, 10 bp, Unknown
  misc_feature (1)..( 10): Result.005 file - promoters50/2029083
ataattgtaa

SEQ ID NO: 179542 - DNA, 10 bp, Unknown
  misc_feature (1)..( 10): Result.005 file - promoters50/2029083
tgaattgtga

SEQ ID NO: 179543 - DNA, 10 bp, Unknown
  misc_feature (1)..( 10): Result.005 file - promoters50/2029083
ataattataa

SEQ ID NO: 179544 - DNA, 11 bp, Unknown
  misc_feature (1)..( 11): Result.005 file - promoters50/2029087
gaaaatgtttt

SEQ ID NO: 179545 - DNA, 11 bp, Unknown
  misc_feature (1)..( 11): Result.005 file - promoters50/2029087
acaaaagttta

SEQ ID NO: 179546 - DNA, 11 bp, Unknown
  misc_feature (1)..( 11): Result.005 file - promoters50/2029087
ttcaatatttt

SEQ ID NO: 179547 - DNA, 11 bp, Unknown
  misc_feature (1)..( 11): Result.005 file - promoters50/2029087
gaaaatggatc

SEQ ID NO: 179548 - DNA, 15 bp, Unknown
  misc_feature (1)..( 15): Result.005 file - promoters50/2029087
atcactgatccaaca

SEQ ID NO: 179549 - DNA, 15 bp, Unknown
  misc_feature (1)..( 15): Result.005 file - promoters50/2029087
atcactgatccaaca

SEQ ID NO: 179550 - DNA, 15 bp, Unknown
  misc_feature (1)..( 15): Result.005 file - promoters50/2029087
atcactgatccaaca

SEQ ID NO: 179551 - DNA, 7 bp, Unknown
  misc_feature (1)..( 7): Result.005 file - promoters50/2029087
cattata

SEQ ID NO: 179552 - DNA, 7 bp, Unknown
  misc_feature (1)..( 7): Result.005 file - promoters50/2029087
cattatc

SEQ ID NO: 179553 - DNA, 7 bp, Unknown
  misc_feature (1)..( 7): Result.005 file - promoters50/2029087
aattatc

SEQ ID NO: 179554 - DNA, 7 bp, Unknown
  misc_feature (1)..( 7): Result.005 file - promoters50/2029087
aattatc

SEQ ID NO: 179555 - DNA, 10 bp, Unknown
  misc_feature (1)..( 10): Result.005 file - promoters50/2033137
ggttacttgg

SEQ ID NO: 179556 - DNA, 10 bp, Unknown
  misc_feature (1)..( 10): Result.005 file - promoters50/2033137
aattagttgc

SEQ ID NO: 179557 - DNA, 10 bp, Unknown
  misc_feature (1)..( 10): Result.005 file - promoters50/2033137
aataagttaa

SEQ ID NO: 179558 - DNA, 10 bp, Unknown
  misc_feature (1)..( 10): Result.005 file - promoters50/2033137
aataaattaa

SEQ ID NO: 179559 - DNA, 12 bp, Unknown
  misc_feature (1)..( 12): Result.005 file - promoters50/2033137
agatatattaag

SEQ ID NO: 179560 - DNA, 12 bp, Unknown
  misc_feature (1)..( 12): Result.005 file - promoters50/2033137
agacatatgaac

SEQ ID NO: 179561 - DNA, 12 bp, Unknown
  misc_feature (1)..( 12): Result.005 file - promoters50/2033137
ttgtatatttta

SEQ ID NO: 179562 - DNA, 12 bp, Unknown
  misc_feature (1)..( 12): Result.005 file - promoters50/2033137
aaaattattttt

SEQ ID NO: 179563 - DNA, 6 bp, Unknown
  misc_feature (1)..( 6): Result.005 file - promoters50/2052918
aacttt

SEQ ID NO: 179564 - DNA, 6 bp, Unknown
  misc_feature (1)..( 6): Result.005 file - promoters50/2052918
aacttt

SEQ ID NO: 179565 - DNA, 6 bp, Unknown
  misc_feature (1)..( 6): Result.005 file - promoters50/2052918
aacttt

SEQ ID NO: 179566 - DNA, 14 bp, Unknown
  misc_feature (1)..( 14): Result.005 file - promoters50/2056926
atcgaataaaatac

SEQ ID NO: 179567 - DNA, 14 bp, Unknown
  misc_feature (1)..( 14): Result.005 file - promoters50/2056926
agtcaataaaagcc

SEQ ID NO: 179568 - DNA, 14 bp, Unknown
  misc_feature (1)..( 14): Result.005 file - promoters50/2056926
acacgatacaatac

SEQ ID NO: 179569 - DNA, 14 bp, Unknown
  misc_feature (1)..( 14): Result.005 file - promoters50/2056926
agataataaataag

SEQ ID NO: 179570 - DNA, 14 bp, Unknown
  misc_feature (1)..( 14): Result.005 file - promoters50/2056926
agagaatacaagtt

SEQ ID NO: 179571 - DNA, 14 bp, Unknown
  misc_feature (1)..( 14): Result.005 file - promoters50/2056926
agtaaataaagtgt

SEQ ID NO: 179572 - DNA, 14 bp, Unknown
  misc_feature (1)..( 14): Result.005 file - promoters50/2056926
cataaataaacaaa

SEQ ID NO: 179573 - DNA, 14 bp, Unknown
  misc_feature (1)..( 14): Result.005 file - promoters50/2056926
tcgaaatagataac

SEQ ID NO: 179574 - DNA, 8 bp, Unknown
  misc_feature (1)..( 8): Result.005 file - promoters50/2104855
aatataat

SEQ ID NO: 179575 - DNA, 8 bp, Unknown
  misc_feature (1)..( 8): Result.005 file - promoters50/2104855
tttataat

SEQ ID NO: 179576 - DNA, 8 bp, Unknown
  misc_feature (1)..( 8): Result.005 file - promoters50/2104855
aatttaaa

SEQ ID NO: 179577 - DNA, 8 bp, Unknown
  misc_feature (1)..( 8): Result.005 file - promoters50/2104855
aatctaac

SEQ ID NO: 179578 - DNA, 7 bp, Unknown
  misc_feature (1)..( 7): Result.005 file - promoters50/2104855
aatataa

SEQ ID NO: 179579 - DNA, 7 bp, Unknown
  misc_feature (1)..( 7): Result.005 file - promoters50/2104855
aatatat

SEQ ID NO: 179580 - DNA, 7 bp, Unknown
  misc_feature (1)..( 7): Result.005 file - promoters50/2104855
aatttaa

SEQ ID NO: 179581 - DNA, 7 bp, Unknown
  misc_feature (1)..( 7): Result.005 file - promoters50/2104855
aatctaa

SEQ ID NO: 179582 - DNA, 7 bp, Unknown
  misc_feature (1)..( 7): Result.005 file - promoters50/2104855
ctaaaag

SEQ ID NO: 179583 - DNA, 7 bp, Unknown
  misc_feature (1)..( 7): Result.005 file - promoters50/2104855
ttaaaag

SEQ ID NO: 179584 - DNA, 7 bp, Unknown
  misc_feature (1)..( 7): Result.005 file - promoters50/2104855
ctaaaac

SEQ ID NO: 179585 - DNA, 10 bp, Unknown
  misc_feature (1)..( 10): Result.005 file - promoters50/2104855
cttctttttc

SEQ ID NO: 179586 - DNA, 10 bp, Unknown
  misc_feature (1)..( 10): Result.005 file - promoters50/2104855
aatttttttc

SEQ ID NO: 179587 - DNA, 10 bp, Unknown
  misc_feature (1)..( 10): Result.005 file - promoters50/2104855
attgttttgg

SEQ ID NO: 179588 - DNA, 9 bp, Unknown
  misc_feature (1)..( 9): Result.005 file - promoters50/2104855
gactacaaa

SEQ ID NO: 179589 - DNA, 9 bp, Unknown
  misc_feature (1)..( 9): Result.005 file - promoters50/2104855
ttctacaat

SEQ ID NO: 179590 - DNA, 9 bp, Unknown
  misc_feature (1)..( 9): Result.005 file - promoters50/2104855
ttctaaaat

SEQ ID NO: 179591 - DNA, 8 bp, Unknown
  misc_feature (1)..( 8): Result.005 file - promoters50/2104855
ccaattat

SEQ ID NO: 179592 - DNA, 8 bp, Unknown
  misc_feature (1)..( 8): Result.005 file - promoters50/2104855
ataattat

SEQ ID NO: 179593 - DNA, 8 bp, Unknown
  misc_feature (1)..( 8): Result.005 file - promoters50/2104855
ataattat

SEQ ID NO: 179594 - DNA, 9 bp, Unknown
  misc_feature (1)..( 9): Result.005 file - promoters50/2104855
cgcaatgaa

SEQ ID NO: 179595 - DNA, 9 bp, Unknown
  misc_feature (1)..( 9): Result.005 file - promoters50/2104855
cgccatgaa

SEQ ID NO: 179596 - DNA, 9 bp, Unknown
  misc_feature (1)..( 9): Result.005 file - promoters50/2104855
tgccatgta

SEQ ID NO: 179597 - DNA, 9 bp, Unknown
  misc_feature (1)..( 9): Result.005 file - promoters50/2104855
aggcccaat

SEQ ID NO: 179598 - DNA, 9 bp, Unknown
  misc_feature (1)..( 9): Result.005 file - promoters50/2104855
aggcccaat

SEQ ID NO: 179599 - DNA, 9 bp, Unknown
  misc_feature (1)..( 9): Result.005 file - promoters50/2104855
cggcccatc

SEQ ID NO: 179600 - DNA, 9 bp, Unknown
  misc_feature (1)..( 9): Result.005 file - promoters50/2104874
aaaaaatta

SEQ ID NO: 179601 - DNA, 9 bp, Unknown
  misc_feature (1)..( 9): Result.005 file - promoters50/2104874
caaaaattt

SEQ ID NO: 179602 - DNA, 9 bp, Unknown
  misc_feature (1)..( 9): Result.005 file - promoters50/2104874
aaaaaatta

SEQ ID NO: 179603 - DNA, 9 bp, Unknown
  misc_feature (1)..( 9): Result.005 file - promoters50/2104874
cctaaattt

SEQ ID NO: 179604 - DNA, 9 bp, Unknown
  misc_feature (1)..( 9): Result.005 file - promoters50/2104874
taaatattc

SEQ ID NO: 179605 - DNA, 9 bp, Unknown
  misc_feature (1)..( 9): Result.005 file - promoters50/2104874
caaaaagca

SEQ ID NO: 179606 - DNA, 14 bp, Unknown
  misc_feature (1)..( 14): Result.005 file - promoters50/2104874
tttggttttctaca

SEQ ID NO: 179607 - DNA, 14 bp, Unknown
  misc_feature (1)..( 14): Result.005 file - promoters50/2104874
cttggttggaacta

SEQ ID NO: 179608 - DNA, 14 bp, Unknown
  misc_feature (1)..( 14): Result.005 file - promoters50/2104874
tttgatttgatttt

SEQ ID NO: 179609 - DNA, 14 bp, Unknown
  misc_feature (1)..( 14): Result.005 file - promoters50/2104874
attgtttgttgcgt

SEQ ID NO: 179610 - DNA, 15 bp, Unknown
  misc_feature (1)..( 15): Result.005 file - promoters50/2104874
cgtgacttggagcta

SEQ ID NO: 179611 - DNA, 15 bp, Unknown
  misc_feature (1)..( 15): Result.005 file - promoters50/2104874
cttaatttttttttg

SEQ ID NO: 179612 - DNA, 10 bp, Unknown
  misc_feature (1)..( 10): Result.005 file - promoters50/2105109
atataaaagc

SEQ ID NO: 179613 - DNA, 10 bp, Unknown
  misc_feature (1)..( 10): Result.005 file - promoters50/2105109
aaataaaaac

SEQ ID NO: 179614 - DNA, 10 bp, Unknown
  misc_feature (1)..( 10): Result.005 file - promoters50/2105109
atataaatgg

SEQ ID NO: 179615 - DNA, 10 bp, Unknown
  misc_feature (1)..( 10): Result.005 file - promoters50/2105109
ctattaaagc

SEQ ID NO: 179616 - DNA, 10 bp, Unknown
  misc_feature (1)..( 10): Result.005 file - promoters50/2105109
caataaagat

SEQ ID NO: 179617 - DNA, 10 bp, Unknown
  misc_feature (1)..( 10): Result.005 file - promoters50/2105109
caataaagat

SEQ ID NO: 179618 - DNA, 10 bp, Unknown
  misc_feature (1)..( 10): Result.005 file - promoters50/2105109
ctatatatat

SEQ ID NO: 179619 - DNA, 10 bp, Unknown
  misc_feature (1)..( 10): Result.005 file - promoters50/2105109
cctaaggcca

SEQ ID NO: 179620 - DNA, 10 bp, Unknown
  misc_feature (1)..( 10): Result.005 file - promoters50/2105109
aataaagccc

SEQ ID NO: 179621 - DNA, 10 bp, Unknown
  misc_feature (1)..( 10): Result.005 file - promoters50/2105109
cctaagccca

SEQ ID NO: 179622 - DNA, 10 bp, Unknown
  misc_feature (1)..( 10): Result.005 file - promoters50/2105109
ctaaaggccc

SEQ ID NO: 179623 - DNA, 10 bp, Unknown
  misc_feature (1)..( 10): Result.005 file - promoters50/2105109
tttaagtccc

SEQ ID NO: 179624 - DNA, 10 bp, Unknown
  misc_feature (1)..( 10): Result.005 file - promoters50/2105109
ctcaaaaccc

SEQ ID NO: 179625 - DNA, 8 bp, Unknown
  misc_feature (1)..( 8): Result.005 file - promoters50/2105141
gtggtaaa

SEQ ID NO: 179626 - DNA, 8 bp, Unknown
  misc_feature (1)..( 8): Result.005 file - promoters50/2105141
gtgctaaa

SEQ ID NO: 179627 - DNA, 8 bp, Unknown
  misc_feature (1)..( 8): Result.005 file - promoters50/2105141
atgctaat

SEQ ID NO: 179628 - DNA, 10 bp, Unknown
  misc_feature (1)..( 10): Result.005 file - promoters50/2105141
aaaacaaact

SEQ ID NO: 179629 - DNA, 10 bp, Unknown
  misc_feature (1)..( 10): Result.005 file - promoters50/2105141
aaatcaaatt

SEQ ID NO: 179630 - DNA, 10 bp, Unknown
  misc_feature (1)..( 10): Result.005 file - promoters50/2105141
ctgtcatatt

SEQ ID NO: 179631 - DNA, 7 bp, Unknown
  misc_feature (1)..( 7): Result.005 file - promoters50/2105141
tttttat

SEQ ID NO: 179632 - DNA, 7 bp, Unknown
  misc_feature (1)..( 7): Result.005 file - promoters50/2105141
tttttat

SEQ ID NO: 179633 - DNA, 7 bp, Unknown
  misc_feature (1)..( 7): Result.005 file - promoters50/2105141
attttat

SEQ ID NO: 179634 - DNA, 9 bp, Unknown
  misc_feature (1)..( 9): Result.005 file - promoters50/2105141
tttatttta

SEQ ID NO: 179635 - DNA, 9 bp, Unknown
  misc_feature (1)..( 9): Result.005 file - promoters50/2105141
catattttc

SEQ ID NO: 179636 - DNA, 9 bp, Unknown
  misc_feature (1)..( 9): Result.005 file - promoters50/2105141
aagatttta

SEQ ID NO: 179637 - DNA, 9 bp, Unknown
  misc_feature (1)..( 9): Result.005 file - promoters50/2105141
catatttat

SEQ ID NO: 179638 - DNA, 7 bp, Unknown
  misc_feature (1)..( 7): Result.005 file - promoters50/2105141
taaataa

SEQ ID NO: 179639 - DNA, 7 bp, Unknown
  misc_feature (1)..( 7): Result.005 file - promoters50/2105141
taaataa

SEQ ID NO: 179640 - DNA, 7 bp, Unknown
  misc_feature (1)..( 7): Result.005 file - promoters50/2105141
taaataa

SEQ ID NO: 179641 - DNA, 8 bp, Unknown
  misc_feature (1)..( 8): Result.005 file - promoters50/2105141
ttttgaat

SEQ ID NO: 179642 - DNA, 8 bp, Unknown
  misc_feature (1)..( 8): Result.005 file - promoters50/2105141
ttttcaat

SEQ ID NO: 179643 - DNA, 8 bp, Unknown
  misc_feature (1)..( 8): Result.005 file - promoters50/2105141
ggttcaat

SEQ ID NO: 179644 - DNA, 11 bp, Unknown
  misc_feature (1)..( 11): Result.005 file - promoters50/2105141
cacaaatcatt

SEQ ID NO: 179645 - DNA, 11 bp, Unknown
  misc_feature (1)..( 11): Result.005 file - promoters50/2105141
cactaatcact

SEQ ID NO: 179646 - DNA, 11 bp, Unknown
  misc_feature (1)..( 11): Result.005 file - promoters50/2105141
tatgaattatt

SEQ ID NO: 179647 - DNA, 10 bp, Unknown
  misc_feature (1)..( 10): Result.005 file - promoters50/2105141
aaaaaaaccc

SEQ ID NO: 179648 - DNA, 10 bp, Unknown
  misc_feature (1)..( 10): Result.005 file - promoters50/2105141
cagaaatccc

SEQ ID NO: 179649 - DNA, 10 bp, Unknown
  misc_feature (1)..( 10): Result.005 file - promoters50/2105141
aaaaaaacat

SEQ ID NO: 179650 - DNA, 14 bp, Unknown
  misc_feature (1)..( 14): Result.005 file - promoters50/2105141
tagtagatatagta

SEQ ID NO: 179651 - DNA, 14 bp, Unknown
  misc_feature (1)..( 14): Result.005 file - promoters50/2105141
ataattataaagta

SEQ ID NO: 179652 - DNA, 14 bp, Unknown
  misc_feature (1)..( 14): Result.005 file - promoters50/2105141
atatttataaataa

SEQ ID NO: 179653 - DNA, 10 bp, Unknown
  misc_feature (1)..( 10): Result.005 file - promoters50/2105141
attttatata

SEQ ID NO: 179654 - DNA, 10 bp, Unknown
  misc_feature (1)..( 10): Result.005 file - promoters50/2105141
ataatatata

SEQ ID NO: 179655 - DNA, 10 bp, Unknown
  misc_feature (1)..( 10): Result.005 file - promoters50/2105141
ataaaatatc

SEQ ID NO: 179656 - DNA, 9 bp, Unknown
  misc_feature (1)..( 9): Result.005 file - promoters50/2105141
tgaatctat

SEQ ID NO: 179657 - DNA, 9 bp, Unknown
  misc_feature (1)..( 9): Result.005 file - promoters50/2105141
acaatttat

SEQ ID NO: 179658 - DNA, 9 bp, Unknown
  misc_feature (1)..( 9): Result.005 file - promoters50/2105141
acaaattaa

SEQ ID NO: 179659 - DNA, 7 bp, Unknown
  misc_feature (1)..( 7): Result.005 file - promoters50/2105141
ttattta

SEQ ID NO: 179660 - DNA, 7 bp, Unknown
  misc_feature (1)..( 7): Result.005 file - promoters50/2105141
ttattta

SEQ ID NO: 179661 - DNA, 7 bp, Unknown
  misc_feature (1)..( 7): Result.005 file - promoters50/2105141
atattta

SEQ ID NO: 179662 - DNA, 7 bp, Unknown
  misc_feature (1)..( 7): Result.005 file - promoters50/2105141
tttgtta

SEQ ID NO: 179663 - DNA, 7 bp, Unknown
  misc_feature (1)..( 7): Result.005 file - promoters50/2105141
tttttta

SEQ ID NO: 179664 - DNA, 7 bp, Unknown
  misc_feature (1)..( 7): Result.005 file - promoters50/2105141
attttta

SEQ ID NO: 179665 - DNA, 7 bp, Unknown
  misc_feature (1)..( 7): Result.005 file - promoters50/2105250
agtttaa

SEQ ID NO: 179666 - DNA, 7 bp, Unknown
  misc_feature (1)..( 7): Result.005 file - promoters50/2105250
agtttat

SEQ ID NO: 179667 - DNA, 7 bp, Unknown
  misc_feature (1)..( 7): Result.005 file - promoters50/2105250
cgtttat

SEQ ID NO: 179668 - DNA, 10 bp, Unknown
  misc_feature (1)..( 10): Result.005 file - promoters50/2105394
cttagtcaat

SEQ ID NO: 179669 - DNA, 10 bp, Unknown
  misc_feature (1)..( 10): Result.005 file - promoters50/2105394
attattcaac

SEQ ID NO: 179670 - DNA, 10 bp, Unknown
  misc_feature (1)..( 10): Result.005 file - promoters50/2105394
attatttcac

SEQ ID NO: 179671 - DNA, 10 bp, Unknown
  misc_feature (1)..( 10): Result.005 file - promoters50/2105394
gatcttcaac

SEQ ID NO: 179672 - DNA, 9 bp, Unknown
  misc_feature (1)..( 9): Result.005 file - promoters50/2105398
caaaataaa

SEQ ID NO: 179673 - DNA, 9 bp, Unknown
  misc_feature (1)..( 9): Result.005 file - promoters50/2105398
gaaaatatt

SEQ ID NO: 179674 - DNA, 9 bp, Unknown
  misc_feature (1)..( 9): Result.005 file - promoters50/2105398
aaaaataag

SEQ ID NO: 179675 - DNA, 9 bp, Unknown
  misc_feature (1)..( 9): Result.005 file - promoters50/2105398
taaaaaaaa

SEQ ID NO: 179676 - DNA, 10 bp, Unknown
  misc_feature (1)..( 10): Result.005 file - promoters50/2105398
taaacatatt

SEQ ID NO: 179677 - DNA, 10 bp, Unknown
  misc_feature (1)..( 10): Result.005 file - promoters50/2105398
taaaaaaaaa

SEQ ID NO: 179678 - DNA, 11 bp, Unknown
  misc_feature (1)..( 11): Result.005 file - promoters50/2105398
aaaactgaacc

SEQ ID NO: 179679 - DNA, 11 bp, Unknown
  misc_feature (1)..( 11): Result.005 file - promoters50/2105398
caaaatgaaaa

SEQ ID NO: 179680 - DNA, 11 bp, Unknown
  misc_feature (1)..( 11): Result.005 file - promoters50/2105398
aaaaataaact

SEQ ID NO: 179681 - DNA, 11 bp, Unknown
  misc_feature (1)..( 11): Result.005 file - promoters50/2105398
tttaatgaaat

SEQ ID NO: 179682 - DNA, 11 bp, Unknown
  misc_feature (1)..( 11): Result.005 file - promoters50/2105398
atcaatcaaat

SEQ ID NO: 179683 - DNA, 11 bp, Unknown
  misc_feature (1)..( 11): Result.005 file - promoters50/2105398
taaaaaaaagg

SEQ ID NO: 179684 - DNA, 10 bp, Unknown
  misc_feature (1)..( 10): Result.005 file - promoters50/2105398
aaaacaaact

SEQ ID NO: 179685 - DNA, 10 bp, Unknown
  misc_feature (1)..( 10): Result.005 file - promoters50/2105398
aaaacaaacg

SEQ ID NO: 179686 - DNA, 10 bp, Unknown
  misc_feature (1)..( 10): Result.005 file - promoters50/2105398
aaaaaaagaa

SEQ ID NO: 179687 - DNA, 10 bp, Unknown
  misc_feature (1)..( 10): Result.005 file - promoters50/2105398
taaacaaact

SEQ ID NO: 179688 - DNA, 10 bp, Unknown
  misc_feature (1)..( 10): Result.005 file - promoters50/2105398
aaaataaact

SEQ ID NO: 179689 - DNA, 10 bp, Unknown
  misc_feature (1)..( 10): Result.005 file - promoters50/2105398
acaacaaagt

SEQ ID NO: 179690 - DNA, 10 bp, Unknown
  misc_feature (1)..( 10): Result.005 file - promoters50/2105398
aaaaaaaaga

SEQ ID NO: 179691 - DNA, 10 bp, Unknown
  misc_feature (1)..( 10): Result.005 file - promoters50/2105398
aaaaaaaagg

SEQ ID NO: 179692 - DNA, 12 bp, Unknown
  misc_feature (1)..( 12): Result.005 file - promoters50/2105398
agaaaaaaaaac

SEQ ID NO: 179693 - DNA, 12 bp, Unknown
  misc_feature (1)..( 12): Result.005 file - promoters50/2105398
ctaaaaaaaagg

SEQ ID NO: 179694 - DNA, 12 bp, Unknown
  misc_feature (1)..( 12): Result.005 file - promoters50/2105398
agaaagaaacat

SEQ ID NO: 179695 - DNA, 13 bp, Unknown
  misc_feature (1)..( 13): Result.005 file - promoters50/2105398
acaaaaataaact

SEQ ID NO: 179696 - DNA, 13 bp, Unknown
  misc_feature (1)..( 13): Result.005 file - promoters50/2105398
taaaagcaactaa

SEQ ID NO: 179697 - DNA, 13 bp, Unknown
  misc_feature (1)..( 13): Result.005 file - promoters50/2105398
tgaaattcatttt

SEQ ID NO: 179698 - DNA, 10 bp, Unknown
  misc_feature (1)..( 10): Result.005 file - promoters50/2105398
taaaaataat

SEQ ID NO: 179699 - DNA, 10 bp, Unknown
  misc_feature (1)..( 10): Result.005 file - promoters50/2105398
caaaattaaa

SEQ ID NO: 179700 - DNA, 10 bp, Unknown
  misc_feature (1)..( 10): Result.005 file - promoters50/2105398
taaatataaa

SEQ ID NO: 179701 - DNA, 10 bp, Unknown
  misc_feature (1)..( 10): Result.005 file - promoters50/2105398
caacattgct

SEQ ID NO: 179702 - DNA, 10 bp, Unknown
  misc_feature (1)..( 10): Result.005 file - promoters50/2105398
caacatttat

SEQ ID NO: 179703 - DNA, 10 bp, Unknown
  misc_feature (1)..( 10): Result.005 file - promoters50/2105398
ttaatataaa

SEQ ID NO: 179704 - DNA, 11 bp, Unknown
  misc_feature (1)..( 11): Result.005 file - promoters50/2105507
aagggaagttg

SEQ ID NO: 179705 - DNA, 11 bp, Unknown
  misc_feature (1)..( 11): Result.005 file - promoters50/2105507
aagcgaatttg

SEQ ID NO: 179706 - DNA, 11 bp, Unknown
  misc_feature (1)..( 11): Result.005 file - promoters50/2105507
ttaagaatttg

SEQ ID NO: 179707 - DNA, 8 bp, Unknown
  misc_feature (1)..( 8): Result.005 file - promoters50/2105533
ggtggaaa

SEQ ID NO: 179708 - DNA, 8 bp, Unknown
  misc_feature (1)..( 8): Result.005 file - promoters50/2105533
tttggaaa

SEQ ID NO: 179709 - DNA, 8 bp, Unknown
  misc_feature (1)..( 8): Result.005 file - promoters50/2105533
ttttgaat

SEQ ID NO: 179710 - DNA, 9 bp, Unknown
  misc_feature (1)..( 9): Result.005 file - promoters50/2105533
aagaagtta

SEQ ID NO: 179711 - DNA, 9 bp, Unknown
  misc_feature (1)..( 9): Result.005 file - promoters50/2105533
ttgaattta

SEQ ID NO: 179712 - DNA, 9 bp, Unknown
  misc_feature (1)..( 9): Result.005 file - promoters50/2105533
aagacgttg

SEQ ID NO: 179713 - DNA, 7 bp, Unknown
  misc_feature (1)..( 7): Result.005 file - promoters50/2105533
gatgaaa

SEQ ID NO: 179714 - DNA, 7 bp, Unknown
  misc_feature (1)..( 7): Result.005 file - promoters50/2105533
gattaaa

SEQ ID NO: 179715 - DNA, 7 bp, Unknown
  misc_feature (1)..( 7): Result.005 file - promoters50/2105533
gattaat

SEQ ID NO: 179716 - DNA, 11 bp, Unknown
  misc_feature (1)..( 11): Result.005 file - promoters50/2105535
gatacaatggt

SEQ ID NO: 179717 - DNA, 11 bp, Unknown
  misc_feature (1)..( 11): Result.005 file - promoters50/2105535
gattcaaaatt

SEQ ID NO: 179718 - DNA, 11 bp, Unknown
  misc_feature (1)..( 11): Result.005 file - promoters50/2105535
aataaaataaa

SEQ ID NO: 179719 - DNA, 11 bp, Unknown
  misc_feature (1)..( 11): Result.005 file - promoters50/2105535
gatacagactt

SEQ ID NO: 179720 - DNA, 12 bp, Unknown
  misc_feature (1)..( 12): Result.005 file - promoters50/2105535
cattccaaagtt

SEQ ID NO: 179721 - DNA, 12 bp, Unknown
  misc_feature (1)..( 12): Result.005 file - promoters50/2105535
gtgtcaaataaa

SEQ ID NO: 179722 - DNA, 10 bp, Unknown
  misc_feature (1)..( 10): Result.005 file - promoters50/2105578
agttagagtc

SEQ ID NO: 179723 - DNA, 10 bp, Unknown
  misc_feature (1)..( 10): Result.005 file - promoters50/2105578
agttagtata

SEQ ID NO: 179724 - DNA, 10 bp, Unknown
  misc_feature (1)..( 10): Result.005 file - promoters50/2105578
ggttattata

SEQ ID NO: 179725 - DNA, 9 bp, Unknown
  misc_feature (1)..( 9): Result.005 file - promoters50/2105578
ttattttct

SEQ ID NO: 179726 - DNA, 9 bp, Unknown
  misc_feature (1)..( 9): Result.005 file - promoters50/2105578
ttattttct

SEQ ID NO: 179727 - DNA, 9 bp, Unknown
  misc_feature (1)..( 9): Result.005 file - promoters50/2105578
ttttttgta

SEQ ID NO: 179728 - DNA, 7 bp, Unknown
  misc_feature (1)..( 7): Result.005 file - promoters50/2105578
attgtag

SEQ ID NO: 179729 - DNA, 7 bp, Unknown
  misc_feature (1)..( 7): Result.005 file - promoters50/2105578
attgtat

SEQ ID NO: 179730 - DNA, 7 bp, Unknown
  misc_feature (1)..( 7): Result.005 file - promoters50/2105578
attttat

SEQ ID NO: 179731 - DNA, 11 bp, Unknown
  misc_feature (1)..( 11): Result.005 file - promoters50/2105578
gtttcaagcct

SEQ ID NO: 179732 - DNA, 11 bp, Unknown
  misc_feature (1)..( 11): Result.005 file - promoters50/2105578
ttctcaatcct

SEQ ID NO: 179733 - DNA, 11 bp, Unknown
  misc_feature (1)..( 11): Result.005 file - promoters50/2105578
ttcttaattat

SEQ ID NO: 179734 - DNA, 7 bp, Unknown
  misc_feature (1)..( 7): Result.005 file - promoters50/2105819
aacatat

SEQ ID NO: 179735 - DNA, 7 bp, Unknown
  misc_feature (1)..( 7): Result.005 file - promoters50/2105819
gacatat

SEQ ID NO: 179736 - DNA, 7 bp, Unknown
  misc_feature (1)..( 7): Result.005 file - promoters50/2105819
aacttat

SEQ ID NO: 179737 - DNA, 8 bp, Unknown
  misc_feature (1)..( 8): Result.005 file - promoters50/2105819
ttaatgat

SEQ ID NO: 179738 - DNA, 8 bp, Unknown
  misc_feature (1)..( 8): Result.005 file - promoters50/2105819
ctaatgat

SEQ ID NO: 179739 - DNA, 8 bp, Unknown
  misc_feature (1)..( 8): Result.005 file - promoters50/2105819
ttattgat

SEQ ID NO: 179740 - DNA, 10 bp, Unknown
  misc_feature (1)..( 10): Result.005 file - promoters50/2105819
aaatgtcata

SEQ ID NO: 179741 - DNA, 10 bp, Unknown
  misc_feature (1)..( 10): Result.005 file - promoters50/2105819
aaatgtcaaa

SEQ ID NO: 179742 - DNA, 10 bp, Unknown
  misc_feature (1)..( 10): Result.005 file - promoters50/2105819
gaatgtaaaa

SEQ ID NO: 179743 - DNA, 8 bp, Unknown
  misc_feature (1)..( 8): Result.005 file - promoters50/2105912
atttgtta

SEQ ID NO: 179744 - DNA, 8 bp, Unknown
  misc_feature (1)..( 8): Result.005 file - promoters50/2105912
atttgtta

SEQ ID NO: 179745 - DNA, 8 bp, Unknown
  misc_feature (1)..( 8): Result.005 file - promoters50/2105912
atttttta

SEQ ID NO: 179746 - DNA, 8 bp, Unknown
  misc_feature (1)..( 8): Result.005 file - promoters50/2105912
gtttgttg

SEQ ID NO: 179747 - DNA, 8 bp, Unknown
  misc_feature (1)..( 8): Result.005 file - promoters50/2105912
atttgttt

SEQ ID NO: 179748 - DNA, 8 bp, Unknown
  misc_feature (1)..( 8): Result.005 file - promoters50/2105912
ttttgtta

SEQ ID NO: 179749 - DNA, 11 bp, Unknown
  misc_feature (1)..( 11): Result.005 file - promoters50/2105912
aagttataagt

SEQ ID NO: 179750 - DNA, 11 bp, Unknown
  misc_feature (1)..( 11): Result.005 file - promoters50/2105912
aatttaaaagt

SEQ ID NO: 179751 - DNA, 11 bp, Unknown
  misc_feature (1)..( 11): Result.005 file - promoters50/2105912
aagctatcagt

SEQ ID NO: 179752 - DNA, 11 bp, Unknown
  misc_feature (1)..( 11): Result.005 file - promoters50/2105912
atgttaaaaac

SEQ ID NO: 179753 - DNA, 11 bp, Unknown
  misc_feature (1)..( 11): Result.005 file - promoters50/2105912
acactaaaagg

SEQ ID NO: 179754 - DNA, 11 bp, Unknown
  misc_feature (1)..( 11): Result.005 file - promoters50/2105912
tggttaaaagt

SEQ ID NO: 179755 - DNA, 9 bp, Unknown
  misc_feature (1)..( 9): Result.005 file - promoters50/2106017
tttcaaaat

SEQ ID NO: 179756 - DNA, 9 bp, Unknown
  misc_feature (1)..( 9): Result.005 file - promoters50/2106017
gttcaaatc

SEQ ID NO: 179757 - DNA, 9 bp, Unknown
  misc_feature (1)..( 9): Result.005 file - promoters50/2106017
tttgaaata

SEQ ID NO: 179758 - DNA, 9 bp, Unknown
  misc_feature (1)..( 9): Result.005 file - promoters50/2106017
agtcaaatc

SEQ ID NO: 179759 - DNA, 9 bp, Unknown
  misc_feature (1)..( 9): Result.005 file - promoters50/2106017
ggtgaaatc

SEQ ID NO: 179760 - DNA, 9 bp, Unknown
  misc_feature (1)..( 9): Result.005 file - promoters50/2106017
gttcaaatc

SEQ ID NO: 179761 - DNA, 11 bp, Unknown
  misc_feature (1)..( 11): Result.005 file - promoters50/2106017
taatgaattaa

SEQ ID NO: 179762 - DNA, 11 bp, Unknown
  misc_feature (1)..( 11): Result.005 file - promoters50/2106017
ttttgagttat

SEQ ID NO: 179763 - DNA, 11 bp, Unknown
  misc_feature (1)..( 11): Result.005 file - promoters50/2106017
aaatgcattaa

SEQ ID NO: 179764 - DNA, 11 bp, Unknown
  misc_feature (1)..( 11): Result.005 file - promoters50/2106017
taataaattag

SEQ ID NO: 179765 - DNA, 11 bp, Unknown
  misc_feature (1)..( 11): Result.005 file - promoters50/2106017
acataaacatt

SEQ ID NO: 179766 - DNA, 11 bp, Unknown
  misc_feature (1)..( 11): Result.005 file - promoters50/2106017
ttgtaagaaaa

SEQ ID NO: 179767 - DNA, 11 bp, Unknown
  misc_feature (1)..( 11): Result.005 file - promoters50/2106017
taattgacaaa

SEQ ID NO: 179768 - DNA, 12 bp, Unknown
  misc_feature (1)..( 12): Result.005 file - promoters50/2106017
gcttgaaatcag

SEQ ID NO: 179769 - DNA, 12 bp, Unknown
  misc_feature (1)..( 12): Result.005 file - promoters50/2106017
gtttgaaatttt

SEQ ID NO: 179770 - DNA, 12 bp, Unknown
  misc_feature (1)..( 12): Result.005 file - promoters50/2106017
gttttaaagttt

SEQ ID NO: 179771 - DNA, 12 bp, Unknown
  misc_feature (1)..( 12): Result.005 file - promoters50/2106017
gttttagatctg

SEQ ID NO: 179772 - DNA, 12 bp, Unknown
  misc_feature (1)..( 12): Result.005 file - promoters50/2106017
ccattaaagctc

SEQ ID NO: 179773 - DNA, 12 bp, Unknown
  misc_feature (1)..( 12): Result.005 file - promoters50/2106017
tgattaaaaagc

SEQ ID NO: 179774 - DNA, 12 bp, Unknown
  misc_feature (1)..( 12): Result.005 file - promoters50/2106017
tattgaagacta

SEQ ID NO: 179775 - DNA, 8 bp, Unknown
  misc_feature (1)..( 8): Result.005 file - promoters50/2106109
aaatggtt

SEQ ID NO: 179776 - DNA, 8 bp, Unknown
  misc_feature (1)..( 8): Result.005 file - promoters50/2106109
aaaaggta

SEQ ID NO: 179777 - DNA, 8 bp, Unknown
  misc_feature (1)..( 8): Result.005 file - promoters50/2106109
taattgtt

SEQ ID NO: 179778 - DNA, 8 bp, Unknown
  misc_feature (1)..( 8): Result.005 file - promoters50/2106109
attttttt

SEQ ID NO: 179779 - DNA, 8 bp, Unknown
  misc_feature (1)..( 8): Result.005 file - promoters50/2106109
attgtttt

SEQ ID NO: 179780 - DNA, 8 bp, Unknown
  misc_feature (1)..( 8): Result.005 file - promoters50/2106109
atttttat

SEQ ID NO: 179781 - DNA, 13 bp, Unknown
  misc_feature (1)..( 13): Result.005 file - promoters50/2106505
gagtaatttcaaa

SEQ ID NO: 179782 - DNA, 13 bp, Unknown
  misc_feature (1)..( 13): Result.005 file - promoters50/2106505
ttcttttttcaat

SEQ ID NO: 179783 - DNA, 13 bp, Unknown
  misc_feature (1)..( 13): Result.005 file - promoters50/2106505
aattaatttaaaa

SEQ ID NO: 179784 - DNA, 13 bp, Unknown
  misc_feature (1)..( 13): Result.005 file - promoters50/2106505
aattgatttagta

SEQ ID NO: 179785 - DNA, 13 bp, Unknown
  misc_feature (1)..( 13): Result.005 file - promoters50/2106505
aatcaattgaatt

SEQ ID NO: 179786 - DNA, 13 bp, Unknown
  misc_feature (1)..( 13): Result.005 file - promoters50/2106505
cgataatttatag

SEQ ID NO: 179787 - DNA, 13 bp, Unknown
  misc_feature (1)..( 13): Result.005 file - promoters50/2106505
aattgatccatga

SEQ ID NO: 179788 - DNA, 7 bp, Unknown
  misc_feature (1)..( 7): Result.005 file - promoters50/2106682
tgtttca

SEQ ID NO: 179789 - DNA, 7 bp, Unknown
  misc_feature (1)..( 7): Result.005 file - promoters50/2106682
tgtttcg

SEQ ID NO: 179790 - DNA, 7 bp, Unknown
  misc_feature (1)..( 7): Result.005 file - promoters50/2106682
cgtttcg

SEQ ID NO: 179791 - DNA, 8 bp, Unknown
  misc_feature (1)..( 8): Result.005 file - promoters50/2106682
attatgat

SEQ ID NO: 179792 - DNA, 8 bp, Unknown
  misc_feature (1)..( 8): Result.005 file - promoters50/2106682
attttgag

SEQ ID NO: 179793 - DNA, 8 bp, Unknown
  misc_feature (1)..( 8): Result.005 file - promoters50/2106682
ttttcgag

SEQ ID NO: 179794 - DNA, 9 bp, Unknown
  misc_feature (1)..( 9): Result.005 file - promoters50/2106758
caaatgaaa

SEQ ID NO: 179795 - DNA, 9 bp, Unknown
  misc_feature (1)..( 9): Result.005 file - promoters50/2106758
taaaagaag

SEQ ID NO: 179796 - DNA, 9 bp, Unknown
  misc_feature (1)..( 9): Result.005 file - promoters50/2106758
caaattaaa

SEQ ID NO: 179797 - DNA, 10 bp, Unknown
  misc_feature (1)..( 10): Result.005 file - promoters50/2106789
atttagaaaa

SEQ ID NO: 179798 - DNA, 10 bp, Unknown
  misc_feature (1)..( 10): Result.005 file - promoters50/2106789
atttataaag

SEQ ID NO: 179799 - DNA, 10 bp, Unknown
  misc_feature (1)..( 10): Result.005 file - promoters50/2106789
tccgataaag

SEQ ID NO: 179800 - DNA, 10 bp, Unknown
  misc_feature (1)..( 10): Result.005 file - promoters50/2106908
agatttttcc

SEQ ID NO: 179801 - DNA, 10 bp, Unknown
  misc_feature (1)..( 10): Result.005 file - promoters50/2106908
agatgtttaa

SEQ ID NO: 179802 - DNA, 10 bp, Unknown
  misc_feature (1)..( 10): Result.005 file - promoters50/2106908
ccatttctcc

SEQ ID NO: 179803 - DNA, 14 bp, Unknown
  misc_feature (1)..( 14): Result.005 file - promoters50/2106908
ataagcggattcgg

SEQ ID NO: 179804 - DNA, 14 bp, Unknown
  misc_feature (1)..( 14): Result.005 file - promoters50/2106908
ataagcctaatcaa

SEQ ID NO: 179805 - DNA, 14 bp, Unknown
  misc_feature (1)..( 14): Result.005 file - promoters50/2106908
gtaaacctaaacaa

SEQ ID NO: 179806 - DNA, 14 bp, Unknown
  misc_feature (1)..( 14): Result.005 file - promoters50/2106908
caaaacaaaaaaaa

SEQ ID NO: 179807 - DNA, 7 bp, Unknown
  misc_feature (1)..( 7): Result.005 file - promoters50/2106908
aaataat

SEQ ID NO: 179808 - DNA, 7 bp, Unknown
  misc_feature (1)..( 7): Result.005 file - promoters50/2106908
aaataaa

SEQ ID NO: 179809 - DNA, 7 bp, Unknown
  misc_feature (1)..( 7): Result.005 file - promoters50/2106908
aaagaaa

SEQ ID NO: 179810 - DNA, 10 bp, Unknown
  misc_feature (1)..( 10): Result.005 file - promoters50/2106908
taatatattt

SEQ ID NO: 179811 - DNA, 10 bp, Unknown
  misc_feature (1)..( 10): Result.005 file - promoters50/2106908
aaataaattg

SEQ ID NO: 179812 - DNA, 10 bp, Unknown
  misc_feature (1)..( 10): Result.005 file - promoters50/2106908
aaagaaaaag

SEQ ID NO: 179813 - DNA, 10 bp, Unknown
  misc_feature (1)..( 10): Result.005 file - promoters50/2106908
atagaaattg

SEQ ID NO: 179814 - DNA, 9 bp, Unknown
  misc_feature (1)..( 9): Result.005 file - promoters50/2106908
aacaaaacc

SEQ ID NO: 179815 - DNA, 9 bp, Unknown
  misc_feature (1)..( 9): Result.005 file - promoters50/2106908
atcaaaacc

SEQ ID NO: 179816 - DNA, 9 bp, Unknown
  misc_feature (1)..( 9): Result.005 file - promoters50/2106908
atctaaatc

SEQ ID NO: 179817 - DNA, 7 bp, Unknown
  misc_feature (1)..( 7): Result.005 file - promoters50/2106908
aaacaaa

SEQ ID NO: 179818 - DNA, 7 bp, Unknown
  misc_feature (1)..( 7): Result.005 file - promoters50/2106908
aaacaaa

SEQ ID NO: 179819 - DNA, 7 bp, Unknown
  misc_feature (1)..( 7): Result.005 file - promoters50/2106908
aaacaaa

SEQ ID NO: 179820 - DNA, 9 bp, Unknown
  misc_feature (1)..( 9): Result.005 file - promoters50/2106908
tatttaaat

SEQ ID NO: 179821 - DNA, 9 bp, Unknown
  misc_feature (1)..( 9): Result.005 file - promoters50/2106908
tatctaaat

SEQ ID NO: 179822 - DNA, 9 bp, Unknown
  misc_feature (1)..( 9): Result.005 file - promoters50/2106908
aatcaaaac

SEQ ID NO: 179823 - DNA, 8 bp, Unknown
  misc_feature (1)..( 8): Result.005 file - promoters50/2106908
aaaataaa

SEQ ID NO: 179824 - DNA, 8 bp, Unknown
  misc_feature (1)..( 8): Result.005 file - promoters50/2106908
aaaaaaaa

SEQ ID NO: 179825 - DNA, 8 bp, Unknown
  misc_feature (1)..( 8): Result.005 file - promoters50/2106908
aaaaaagt

SEQ ID NO: 179826 - DNA, 9 bp, Unknown
  misc_feature (1)..( 9): Result.005 file - promoters50/2107016
cttgttatt

SEQ ID NO: 179827 - DNA, 9 bp, Unknown
  misc_feature (1)..( 9): Result.005 file - promoters50/2107016
ctttttatt

SEQ ID NO: 179828 - DNA, 9 bp, Unknown
  misc_feature (1)..( 9): Result.005 file - promoters50/2107016
ggtttgatt

SEQ ID NO: 179829 - DNA, 9 bp, Unknown
  misc_feature (1)..( 9): Result.005 file - promoters50/2107016
gtcaaaaaa

SEQ ID NO: 179830 - DNA, 9 bp, Unknown
  misc_feature (1)..( 9): Result.005 file - promoters50/2107016
gtcaaatcc

SEQ ID NO: 179831 - DNA, 9 bp, Unknown
  misc_feature (1)..( 9): Result.005 file - promoters50/2107016
ctcaaaaaa

SEQ ID NO: 179832 - DNA, 14 bp, Unknown
  misc_feature (1)..( 14): Result.005 file - promoters50/2107065
aaattgaataaaag

SEQ ID NO: 179833 - DNA, 14 bp, Unknown
  misc_feature (1)..( 14): Result.005 file - promoters50/2107065
gtactgaagaaaaa

SEQ ID NO: 179834 - DNA, 14 bp, Unknown
  misc_feature (1)..( 14): Result.005 file - promoters50/2107065
tgcattaataaatg

SEQ ID NO: 179835 - DNA, 14 bp, Unknown
  misc_feature (1)..( 14): Result.005 file - promoters50/2107065
ttattcaatccaaa

SEQ ID NO: 179836 - DNA, 14 bp, Unknown
  misc_feature (1)..( 14): Result.005 file - promoters50/2107065
ccaaataagaaatt

SEQ ID NO: 179837 - DNA, 14 bp, Unknown
  misc_feature (1)..( 14): Result.005 file - promoters50/2107065
tattccaatacatg

SEQ ID NO: 179838 - DNA, 14 bp, Unknown
  misc_feature (1)..( 14): Result.005 file - promoters50/2107065
ttatgcaaagccat

SEQ ID NO: 179839 - DNA, 10 bp, Unknown
  misc_feature (1)..( 10): Result.005 file - promoters50/2107065
tgctaattta

SEQ ID NO: 179840 - DNA, 10 bp, Unknown
  misc_feature (1)..( 10): Result.005 file - promoters50/2107065
caataatttg

SEQ ID NO: 179841 - DNA, 10 bp, Unknown
  misc_feature (1)..( 10): Result.005 file - promoters50/2107065
acttaactta

SEQ ID NO: 179842 - DNA, 10 bp, Unknown
  misc_feature (1)..( 10): Result.005 file - promoters50/2107065
tgctcatttt

SEQ ID NO: 179843 - DNA, 10 bp, Unknown
  misc_feature (1)..( 10): Result.005 file - promoters50/2107065
aaataattct

SEQ ID NO: 179844 - DNA, 10 bp, Unknown
  misc_feature (1)..( 10): Result.005 file - promoters50/2107065
aaacaattca

SEQ ID NO: 179845 - DNA, 8 bp, Unknown
  misc_feature (1)..( 8): Result.005 file - promoters50/2107069
gttggaga

SEQ ID NO: 179846 - DNA, 8 bp, Unknown
  misc_feature (1)..( 8): Result.005 file - promoters50/2107069
gttggaag

SEQ ID NO: 179847 - DNA, 8 bp, Unknown
  misc_feature (1)..( 8): Result.005 file - promoters50/2107069
cttggaga

SEQ ID NO: 179848 - DNA, 7 bp, Unknown
  misc_feature (1)..( 7): Result.005 file - promoters50/2107069
ctgttgg

SEQ ID NO: 179849 - DNA, 7 bp, Unknown
  misc_feature (1)..( 7): Result.005 file - promoters50/2107069
atgttgg

SEQ ID NO: 179850 - DNA, 7 bp, Unknown
  misc_feature (1)..( 7): Result.005 file - promoters50/2107069
atgttgc

SEQ ID NO: 179851 - DNA, 12 bp, Unknown
  misc_feature (1)..( 12): Result.005 file - promoters50/2107069
gtgttttagttt

SEQ ID NO: 179852 - DNA, 12 bp, Unknown
  misc_feature (1)..( 12): Result.005 file - promoters50/2107069
gtgattttgttt

SEQ ID NO: 179853 - DNA, 12 bp, Unknown
  misc_feature (1)..( 12): Result.005 file - promoters50/2107069
gtgattccatta

SEQ ID NO: 179854 - DNA, 9 bp, Unknown
  misc_feature (1)..( 9): Result.005 file - promoters50/2108834
aatgaaaaa

SEQ ID NO: 179855 - DNA, 9 bp, Unknown
  misc_feature (1)..( 9): Result.005 file - promoters50/2108834
aattaaaat

SEQ ID NO: 179856 - DNA, 9 bp, Unknown
  misc_feature (1)..( 9): Result.005 file - promoters50/2108834
tccgaaaaa

SEQ ID NO: 179857 - DNA, 8 bp, Unknown
  misc_feature (1)..( 8): Result.005 file - promoters50/2108834
tttcgtaa

SEQ ID NO: 179858 - DNA, 8 bp, Unknown
  misc_feature (1)..( 8): Result.005 file - promoters50/2108834
tttcgtgg

SEQ ID NO: 179859 - DNA, 8 bp, Unknown
  misc_feature (1)..( 8): Result.005 file - promoters50/2108834
tttcttgg

SEQ ID NO: 179860 - DNA, 8 bp, Unknown
  misc_feature (1)..( 8): Result.005 file - promoters50/2109486
ggaaagat

SEQ ID NO: 179861 - DNA, 8 bp, Unknown
  misc_feature (1)..( 8): Result.005 file - promoters50/2109486
tgaaagat

SEQ ID NO: 179862 - DNA, 8 bp, Unknown
  misc_feature (1)..( 8): Result.005 file - promoters50/2109486
tgagagat

SEQ ID NO: 179863 - DNA, 8 bp, Unknown
  misc_feature (1)..( 8): Result.005 file - promoters50/2109486
gattattg

SEQ ID NO: 179864 - DNA, 8 bp, Unknown
  misc_feature (1)..( 8): Result.005 file - promoters50/2109486
gattattt

SEQ ID NO: 179865 - DNA, 8 bp, Unknown
  misc_feature (1)..( 8): Result.005 file - promoters50/2109486
atttattt

SEQ ID NO: 179866 - DNA, 7 bp, Unknown
  misc_feature (1)..( 7): Result.005 file - promoters50/2109486
aatatta

SEQ ID NO: 179867 - DNA, 7 bp, Unknown
  misc_feature (1)..( 7): Result.005 file - promoters50/2109486
catatta

SEQ ID NO: 179868 - DNA, 7 bp, Unknown
  misc_feature (1)..( 7): Result.005 file - promoters50/2109486
catgtta

SEQ ID NO: 179869 - DNA, 9 bp, Unknown
  misc_feature (1)..( 9): Result.005 file - promoters50/2113269
cgtttgata

SEQ ID NO: 179870 - DNA, 9 bp, Unknown
  misc_feature (1)..( 9): Result.005 file - promoters50/2113269
tgtttcata

SEQ ID NO: 179871 - DNA, 9 bp, Unknown
  misc_feature (1)..( 9): Result.005 file - promoters50/2113269
tttttgata

SEQ ID NO: 179872 - DNA, 9 bp, Unknown
  misc_feature (1)..( 9): Result.005 file - promoters50/2113269
agtttaata

SEQ ID NO: 179873 - DNA, 9 bp, Unknown
  misc_feature (1)..( 9): Result.005 file - promoters50/2113269
attttgaca

SEQ ID NO: 179874 - DNA, 9 bp, Unknown
  misc_feature (1)..( 9): Result.005 file - promoters50/2113269
agtataaaa

SEQ ID NO: 179875 - DNA, 10 bp, Unknown
  misc_feature (1)..( 10): Result.005 file - promoters50/2113269
atctacatat

SEQ ID NO: 179876 - DNA, 10 bp, Unknown
  misc_feature (1)..( 10): Result.005 file - promoters50/2113269
atcttcatat

SEQ ID NO: 179877 - DNA, 10 bp, Unknown
  misc_feature (1)..( 10): Result.005 file - promoters50/2113269
tactatataa

SEQ ID NO: 179878 - DNA, 10 bp, Unknown
  misc_feature (1)..( 10): Result.005 file - promoters50/2113269
ttctttataa

SEQ ID NO: 179879 - DNA, 10 bp, Unknown
  misc_feature (1)..( 10): Result.005 file - promoters50/2113269
ctttatatag

SEQ ID NO: 179880 - DNA, 10 bp, Unknown
  misc_feature (1)..( 10): Result.005 file - promoters50/2113269
gtctatataa

SEQ ID NO: 179881 - DNA, 13 bp, Unknown
  misc_feature (1)..( 13): Result.005 file - promoters50/2113269
acgattattcctg

SEQ ID NO: 179882 - DNA, 13 bp, Unknown
  misc_feature (1)..( 13): Result.005 file - promoters50/2113269
acgattataaaca

SEQ ID NO: 179883 - DNA, 13 bp, Unknown
  misc_feature (1)..( 13): Result.005 file - promoters50/2113269
gttattatttaat

SEQ ID NO: 179884 - DNA, 13 bp, Unknown
  misc_feature (1)..( 13): Result.005 file - promoters50/2113269
ctcattttaacat

SEQ ID NO: 179885 - DNA, 13 bp, Unknown
  misc_feature (1)..( 13): Result.005 file - promoters50/2113269
ttttttttaacaa

SEQ ID NO: 179886 - DNA, 13 bp, Unknown
  misc_feature (1)..( 13): Result.005 file - promoters50/2113269
catatttttataa

SEQ ID NO: 179887 - DNA, 13 bp, Unknown
  misc_feature (1)..( 13): Result.005 file - promoters50/2113269
tactttttaaaat

SEQ ID NO: 179888 - DNA, 18 bp, Unknown
  misc_feature (1)..( 18): Result.005 file - promoters50/2113269
atagtcaaatatcaccga

SEQ ID NO: 179889 - DNA, 18 bp, Unknown
  misc_feature (1)..( 18): Result.005 file - promoters50/2113269
ctagtcataagagtaagg

SEQ ID NO: 179890 - DNA, 18 bp, Unknown
  misc_feature (1)..( 18): Result.005 file - promoters50/2113269
atagtaaaaaaatcttgg

SEQ ID NO: 179891 - DNA, 18 bp, Unknown
  misc_feature (1)..( 18): Result.005 file - promoters50/2113269
aatataaaaaaataactt

SEQ ID NO: 179892 - DNA, 18 bp, Unknown
  misc_feature (1)..( 18): Result.005 file - promoters50/2113269
aaaataaaaagttttggg

SEQ ID NO: 179893 - DNA, 18 bp, Unknown
  misc_feature (1)..( 18): Result.005 file - promoters50/2113269
gatgtaaaaaaaaacttt

SEQ ID NO: 179894 - DNA, 11 bp, Unknown
  misc_feature (1)..( 11): Result.005 file - promoters50/2113269
taactttcact

SEQ ID NO: 179895 - DNA, 11 bp, Unknown
  misc_feature (1)..( 11): Result.005 file - promoters50/2113269
aaacttttgag

SEQ ID NO: 179896 - DNA, 11 bp, Unknown
  misc_feature (1)..( 11): Result.005 file - promoters50/2113269
aaacttttact

SEQ ID NO: 179897 - DNA, 11 bp, Unknown
  misc_feature (1)..( 11): Result.005 file - promoters50/2113269
aaacttttttt

SEQ ID NO: 179898 - DNA, 12 bp, Unknown
  misc_feature (1)..( 12): Result.005 file - promoters50/2113269
aaagctttccaa

SEQ ID NO: 179899 - DNA, 12 bp, Unknown
  misc_feature (1)..( 12): Result.005 file - promoters50/2113269
aacatttttttc

SEQ ID NO: 179900 - DNA, 13 bp, Unknown
  misc_feature (1)..( 13): Result.005 file - promoters50/2113269
gacatatttttat

SEQ ID NO: 179901 - DNA, 13 bp, Unknown
  misc_feature (1)..( 13): Result.005 file - promoters50/2113269
agaatataaaaaa

SEQ ID NO: 179902 - DNA, 13 bp, Unknown
  misc_feature (1)..( 13): Result.005 file - promoters50/2113269
cgattataaacac

SEQ ID NO: 179903 - DNA, 13 bp, Unknown
  misc_feature (1)..( 13): Result.005 file - promoters50/2113269
ttaaaataaaaag

SEQ ID NO: 179904 - DNA, 13 bp, Unknown
  misc_feature (1)..( 13): Result.005 file - promoters50/2113269
tcattttaacatc

SEQ ID NO: 179905 - DNA, 13 bp, Unknown
  misc_feature (1)..( 13): Result.005 file - promoters50/2113269
tttttttaacaaa

SEQ ID NO: 179906 - DNA, 13 bp, Unknown
  misc_feature (1)..( 13): Result.005 file - promoters50/2113269
tttttataaatag

SEQ ID NO: 179907 - DNA, 13 bp, Unknown
  misc_feature (1)..( 13): Result.005 file - promoters50/2113269
ttgatgtaaaaaa

SEQ ID NO: 179908 - DNA, 13 bp, Unknown
  misc_feature (1)..( 13): Result.005 file - promoters50/2113269
aaactttttctaa

SEQ ID NO: 179909 - DNA, 13 bp, Unknown
  misc_feature (1)..( 13): Result.005 file - promoters50/2113269
aaacttttttttt

SEQ ID NO: 179910 - DNA, 13 bp, Unknown
  misc_feature (1)..( 13): Result.005 file - promoters50/2113269
ttactttttaaaa

SEQ ID NO: 179911 - DNA, 13 bp, Unknown
  misc_feature (1)..( 13): Result.005 file - promoters50/2113269
catttttttcacc

SEQ ID NO: 179912 - DNA, 13 bp, Unknown
  misc_feature (1)..( 13): Result.005 file - promoters50/2113269
catatttttataa

SEQ ID NO: 179913 - DNA, 13 bp, Unknown
  misc_feature (1)..( 13): Result.005 file - promoters50/2113269
ttactatttgatg

SEQ ID NO: 179914 - DNA, 13 bp, Unknown
  misc_feature (1)..( 13): Result.005 file - promoters50/2113269
aaacttttgagag

SEQ ID NO: 179915 - DNA, 11 bp, Unknown
  misc_feature (1)..( 11): Result.005 file - promoters50/2113269
tttttctaata

SEQ ID NO: 179916 - DNA, 11 bp, Unknown
  misc_feature (1)..( 11): Result.005 file - promoters50/2113269
aatttctagtc

SEQ ID NO: 179917 - DNA, 11 bp, Unknown
  misc_feature (1)..( 11): Result.005 file - promoters50/2113269
actttttaaaa

SEQ ID NO: 179918 - DNA, 11 bp, Unknown
  misc_feature (1)..( 11): Result.005 file - promoters50/2113269
tatttttataa

SEQ ID NO: 179919 - DNA, 11 bp, Unknown
  misc_feature (1)..( 11): Result.005 file - promoters50/2113269
ggcttttaaag

SEQ ID NO: 179920 - DNA, 11 bp, Unknown
  misc_feature (1)..( 11): Result.005 file - promoters50/2113269
tcattttaaca

SEQ ID NO: 179921 - DNA, 11 bp, Unknown
  misc_feature (1)..( 11): Result.005 file - promoters50/2113269
actatttatct

SEQ ID NO: 179922 - DNA, 12 bp, Unknown
  misc_feature (1)..( 12): Result.005 file - promoters50/2113269
atataaaaaaat

SEQ ID NO: 179923 - DNA, 12 bp, Unknown
  misc_feature (1)..( 12): Result.005 file - promoters50/2113269
ttttaacaaatt

SEQ ID NO: 179924 - DNA, 12 bp, Unknown
  misc_feature (1)..( 12): Result.005 file - promoters50/2113269
aaataaaaagtt

SEQ ID NO: 179925 - DNA, 12 bp, Unknown
  misc_feature (1)..( 12): Result.005 file - promoters50/2113269
tagtaaaaaaat

SEQ ID NO: 179926 - DNA, 12 bp, Unknown
  misc_feature (1)..( 12): Result.005 file - promoters50/2113269
ttttaacatctt

SEQ ID NO: 179927 - DNA, 12 bp, Unknown
  misc_feature (1)..( 12): Result.005 file - promoters50/2113269
atgtaaaaaaaa

SEQ ID NO: 179928 - DNA, 9 bp, Unknown
  misc_feature (1)..( 9): Result.005 file - promoters50/2113269
cttttaaag

SEQ ID NO: 179929 - DNA, 9 bp, Unknown
  misc_feature (1)..( 9): Result.005 file - promoters50/2113269
tttttaaca

SEQ ID NO: 179930 - DNA, 9 bp, Unknown
  misc_feature (1)..( 9): Result.005 file - promoters50/2113269
tttttaaaa

SEQ ID NO: 179931 - DNA, 9 bp, Unknown
  misc_feature (1)..( 9): Result.005 file - promoters50/2113269
attttaaca

SEQ ID NO: 179932 - DNA, 9 bp, Unknown
  misc_feature (1)..( 9): Result.005 file - promoters50/2113269
tttttataa

SEQ ID NO: 179933 - DNA, 9 bp, Unknown
  misc_feature (1)..( 9): Result.005 file - promoters50/2113269
actttaact

SEQ ID NO: 179934 - DNA, 9 bp, Unknown
  misc_feature (1)..( 9): Result.005 file - promoters50/2113299
catatttca

SEQ ID NO: 179935 - DNA, 9 bp, Unknown
  misc_feature (1)..( 9): Result.005 file - promoters50/2113299
tttatttcg

SEQ ID NO: 179936 - DNA, 9 bp, Unknown
  misc_feature (1)..( 9): Result.005 file - promoters50/2113299
catattttc

SEQ ID NO: 179937 - DNA, 9 bp, Unknown
  misc_feature (1)..( 9): Result.005 file - promoters50/2113299
catttttat

SEQ ID NO: 179938 - DNA, 9 bp, Unknown
  misc_feature (1)..( 9): Result.005 file - promoters50/2113299
agtatatca

SEQ ID NO: 179939 - DNA, 9 bp, Unknown
  misc_feature (1)..( 9): Result.005 file - promoters50/2113299
tgtatttta

SEQ ID NO: 179940 - DNA, 13 bp, Unknown
  misc_feature (1)..( 13): Result.005 file - promoters50/2113299
atgtgtataaata

SEQ ID NO: 179941 - DNA, 13 bp, Unknown
  misc_feature (1)..( 13): Result.005 file - promoters50/2113299
ctccctataaatt

SEQ ID NO: 179942 - DNA, 13 bp, Unknown
  misc_feature (1)..( 13): Result.005 file - promoters50/2113299
gtttttatatata

SEQ ID NO: 179943 - DNA, 13 bp, Unknown
  misc_feature (1)..( 13): Result.005 file - promoters50/2113299
tccattatatata

SEQ ID NO: 179944 - DNA, 14 bp, Unknown
  misc_feature (1)..( 14): Result.005 file - promoters50/2113299
agtgagatataata

SEQ ID NO: 179945 - DNA, 14 bp, Unknown
  misc_feature (1)..( 14): Result.005 file - promoters50/2113299
tcctttatattctc

SEQ ID NO: 179946 - DNA, 12 bp, Unknown
  misc_feature (1)..( 12): Result.005 file - promoters50/2113299
aacaaaaataaa

SEQ ID NO: 179947 - DNA, 12 bp, Unknown
  misc_feature (1)..( 12): Result.005 file - promoters50/2113299
cccaaaaataag

SEQ ID NO: 179948 - DNA, 12 bp, Unknown
  misc_feature (1)..( 12): Result.005 file - promoters50/2113299
tacaaaactaca

SEQ ID NO: 179949 - DNA, 12 bp, Unknown
  misc_feature (1)..( 12): Result.005 file - promoters50/2113299
cccaaaattgac

SEQ ID NO: 179950 - DNA, 12 bp, Unknown
  misc_feature (1)..( 12): Result.005 file - promoters50/2113299
aataaacatatt

SEQ ID NO: 179951 - DNA, 12 bp, Unknown
  misc_feature (1)..( 12): Result.005 file - promoters50/2113299
gctaaccatatt

SEQ ID NO: 179952 - DNA, 12 bp, Unknown
  misc_feature (1)..( 12): Result.005 file - promoters50/2113299
ggcaaaaccagt

SEQ ID NO: 179953 - DNA, 9 bp, Unknown
  misc_feature (1)..( 9): Result.005 file - promoters50/2113315
taaaatgcg

SEQ ID NO: 179954 - DNA, 9 bp, Unknown
  misc_feature (1)..( 9): Result.005 file - promoters50/2113315
taaaataat

SEQ ID NO: 179955 - DNA, 9 bp, Unknown
  misc_feature (1)..( 9): Result.005 file - promoters50/2113315
gaaaatgat

SEQ ID NO: 179956 - DNA, 9 bp, Unknown
  misc_feature (1)..( 9): Result.005 file - promoters50/2113315
taaagtaat

SEQ ID NO: 179957 - DNA, 9 bp, Unknown
  misc_feature (1)..( 9): Result.005 file - promoters50/2113315
caaattaaa

SEQ ID NO: 179958 - DNA, 9 bp, Unknown
  misc_feature (1)..( 9): Result.005 file - promoters50/2113315
aaaattgac

SEQ ID NO: 179959 - DNA, 9 bp, Unknown
  misc_feature (1)..( 9): Result.005 file - promoters50/2113323
atatttttt

SEQ ID NO: 179960 - DNA, 9 bp, Unknown
  misc_feature (1)..( 9): Result.005 file - promoters50/2113323
caattattt

SEQ ID NO: 179961 - DNA, 9 bp, Unknown
  misc_feature (1)..( 9): Result.005 file - promoters50/2113323
aactttttt

SEQ ID NO: 179962 - DNA, 9 bp, Unknown
  misc_feature (1)..( 9): Result.005 file - promoters50/2113323
caaatattt

SEQ ID NO: 179963 - DNA, 10 bp, Unknown
  misc_feature (1)..( 10): Result.005 file - promoters50/2113323
aattgtttaa

SEQ ID NO: 179964 - DNA, 10 bp, Unknown
  misc_feature (1)..( 10): Result.005 file - promoters50/2113323
gattgttttc

SEQ ID NO: 179965 - DNA, 10 bp, Unknown
  misc_feature (1)..( 10): Result.005 file - promoters50/2113323
tattttttaa

SEQ ID NO: 179966 - DNA, 10 bp, Unknown
  misc_feature (1)..( 10): Result.005 file - promoters50/2113323
gattgtaatg

SEQ ID NO: 179967 - DNA, 9 bp, Unknown
  misc_feature (1)..( 9): Result.005 file - promoters50/2113323
tttatattt

SEQ ID NO: 179968 - DNA, 9 bp, Unknown
  misc_feature (1)..( 9): Result.005 file - promoters50/2113323
caaatattt

SEQ ID NO: 179969 - DNA, 9 bp, Unknown
  misc_feature (1)..( 9): Result.005 file - promoters50/2113323
caattattt

SEQ ID NO: 179970 - DNA, 7 bp, Unknown
  misc_feature (1)..( 7): Result.005 file - promoters50/2113323
ttatata

SEQ ID NO: 179971 - DNA, 7 bp, Unknown
  misc_feature (1)..( 7): Result.005 file - promoters50/2113323
atatata

SEQ ID NO: 179972 - DNA, 7 bp, Unknown
  misc_feature (1)..( 7): Result.005 file - promoters50/2113323
atatatg

SEQ ID NO: 179973 - DNA, 14 bp, Unknown
  misc_feature (1)..( 14): Result.005 file - promoters50/2113323
ctcatatatataca

SEQ ID NO: 179974 - DNA, 14 bp, Unknown
  misc_feature (1)..( 14): Result.005 file - promoters50/2113323
ctcatataaataca

SEQ ID NO: 179975 - DNA, 14 bp, Unknown
  misc_feature (1)..( 14): Result.005 file - promoters50/2113323
cccctataaaacaa

SEQ ID NO: 179976 - DNA, 9 bp, Unknown
  misc_feature (1)..( 9): Result.005 file - promoters50/2113323
gtaaatgta

SEQ ID NO: 179977 - DNA, 9 bp, Unknown
  misc_feature (1)..( 9): Result.005 file - promoters50/2113323
gtaaatact

SEQ ID NO: 179978 - DNA, 9 bp, Unknown
  misc_feature (1)..( 9): Result.005 file - promoters50/2113323
ataaatact

SEQ ID NO: 179979 - DNA, 9 bp, Unknown
  misc_feature (1)..( 9): Result.005 file - promoters50/2113338
caaacactt

SEQ ID NO: 179980 - DNA, 9 bp, Unknown
  misc_feature (1)..( 9): Result.005 file - promoters50/2113338
caaccactg

SEQ ID NO: 179981 - DNA, 9 bp, Unknown
  misc_feature (1)..( 9): Result.005 file - promoters50/2113338
agaacgctt

SEQ ID NO: 179982 - DNA, 7 bp, Unknown
  misc_feature (1)..( 7): Result.005 file - promoters50/2113338
gaatcaa

SEQ ID NO: 179983 - DNA, 7 bp, Unknown
  misc_feature (1)..( 7): Result.005 file - promoters50/2113338
aaatcaa

SEQ ID NO: 179984 - DNA, 7 bp, Unknown
  misc_feature (1)..( 7): Result.005 file - promoters50/2113338
gaaccaa

SEQ ID NO: 179985 - DNA, 12 bp, Unknown
  misc_feature (1)..( 12): Result.005 file - promoters50/2113418
aacttgtctgag

SEQ ID NO: 179986 - DNA, 12 bp, Unknown
  misc_feature (1)..( 12): Result.005 file - promoters50/2113418
aacatgtatgaa

SEQ ID NO: 179987 - DNA, 12 bp, Unknown
  misc_feature (1)..( 12): Result.005 file - promoters50/2113418
aacaggtacaga

SEQ ID NO: 179988 - DNA, 12 bp, Unknown
  misc_feature (1)..( 12): Result.005 file - promoters50/2113418
aaaacgtatgaa

SEQ ID NO: 179989 - DNA, 7 bp, Unknown
  misc_feature (1)..( 7): Result.005 file - promoters50/2113418
ggaaaac

SEQ ID NO: 179990 - DNA, 7 bp, Unknown
  misc_feature (1)..( 7): Result.005 file - promoters50/2113418
ggaaaaa

SEQ ID NO: 179991 - DNA, 7 bp, Unknown
  misc_feature (1)..( 7): Result.005 file - promoters50/2113418
agaaaaa

SEQ ID NO: 179992 - DNA, 13 bp, Unknown
  misc_feature (1)..( 13): Result.005 file - promoters50/2113434
agagcttgacgaa

SEQ ID NO: 179993 - DNA, 13 bp, Unknown
  misc_feature (1)..( 13): Result.005 file - promoters50/2113434
agagattgaggaa

SEQ ID NO: 179994 - DNA, 13 bp, Unknown
  misc_feature (1)..( 13): Result.005 file - promoters50/2113434
tgagcttgagaag

SEQ ID NO: 179995 - DNA, 9 bp, Unknown
  misc_feature (1)..( 9): Result.005 file - promoters50/2113434
gagcttctt

SEQ ID NO: 179996 - DNA, 9 bp, Unknown
  misc_feature (1)..( 9): Result.005 file - promoters50/2113434
gagcttgag

SEQ ID NO: 179997 - DNA, 9 bp, Unknown
  misc_feature (1)..( 9): Result.005 file - promoters50/2113434
gagattgag

SEQ ID NO: 179998 - DNA, 8 bp, Unknown
  misc_feature (1)..( 8): Result.005 file - promoters50/2113434
tctaaaac

SEQ ID NO: 179999 - DNA, 8 bp, Unknown
  misc_feature (1)..( 8): Result.005 file - promoters50/2113434
tctaaaaa

SEQ ID NO: 180000 - DNA, 9 bp, Unknown
  misc_feature (1)..( 9): Result.005 file - promoters50/2113434
ggtaagaaa

SEQ ID NO: 180001 - DNA, 10 bp, Unknown
  misc_feature (1)..( 10): Result.005 file - promoters50/2113445
ttttgaatat

SEQ ID NO: 180002 - DNA, 10 bp, Unknown
  misc_feature (1)..( 10): Result.005 file - promoters50/2113445
tattgaatat

SEQ ID NO: 180003 - DNA, 11 bp, Unknown
  misc_feature (1)..( 11): Result.005 file - promoters50/2113445
ctttagaactt

SEQ ID NO: 180004 - DNA, 11 bp, Unknown
  misc_feature (1)..( 11): Result.005 file - promoters50/2113445
gagttggatag

SEQ ID NO: 180005 - DNA, 8 bp, Unknown
  misc_feature (1)..( 8): Result.005 file - promoters50/2113445
aagattta

SEQ ID NO: 180006 - DNA, 8 bp, Unknown
  misc_feature (1)..( 8): Result.005 file - promoters50/2113445
aagattta

SEQ ID NO: 180007 - DNA, 8 bp, Unknown
  misc_feature (1)..( 8): Result.005 file - promoters50/2113445
aagtttta

SEQ ID NO: 180008 - DNA, 7 bp, Unknown
  misc_feature (1)..( 7): Result.005 file - promoters50/2113445
aactttg

SEQ ID NO: 180009 - DNA, 7 bp, Unknown
  misc_feature (1)..( 7): Result.005 file - promoters50/2113445
tactttg

SEQ ID NO: 180010 - DNA, 7 bp, Unknown
  misc_feature (1)..( 7): Result.005 file - promoters50/2113445
tactttt

SEQ ID NO: 180011 - DNA, 8 bp, Unknown
  misc_feature (1)..( 8): Result.005 file - promoters50/2113445
aacataaa

SEQ ID NO: 180012 - DNA, 8 bp, Unknown
  misc_feature (1)..( 8): Result.005 file - promoters50/2113445
aacttaat

SEQ ID NO: 180013 - DNA, 8 bp, Unknown
  misc_feature (1)..( 8): Result.005 file - promoters50/2113445
atcataaa

SEQ ID NO: 180014 - DNA, 10 bp, Unknown
  misc_feature (1)..( 10): Result.005 file - promoters50/2113445
ttattaatat

SEQ ID NO: 180015 - DNA, 10 bp, Unknown
  misc_feature (1)..( 10): Result.005 file - promoters50/2113445
ttattattat

SEQ ID NO: 180016 - DNA, 10 bp, Unknown
  misc_feature (1)..( 10): Result.005 file - promoters50/2113445
gtattatcaa

SEQ ID NO: 180017 - DNA, 13 bp, Unknown
  misc_feature (1)..( 13): Result.005 file - promoters50/2113462
aaaattaagatat

SEQ ID NO: 180018 - DNA, 13 bp, Unknown
  misc_feature (1)..( 13): Result.005 file - promoters50/2113462
caaactaaaatat

SEQ ID NO: 180019 - DNA, 13 bp, Unknown
  misc_feature (1)..( 13): Result.005 file - promoters50/2113462
taaattacaatta

SEQ ID NO: 180020 - DNA, 13 bp, Unknown
  misc_feature (1)..( 13): Result.005 file - promoters50/2113462
ggatgtaatcagc

SEQ ID NO: 180021 - DNA, 13 bp, Unknown
  misc_feature (1)..( 13): Result.005 file - promoters50/2113462
aaaagttagttta

SEQ ID NO: 180022 - DNA, 13 bp, Unknown
  misc_feature (1)..( 13): Result.005 file - promoters50/2113462
aaaaataatattt

SEQ ID NO: 180023 - DNA, 13 bp, Unknown
  misc_feature (1)..( 13): Result.005 file - promoters50/2113462
taaaatcagatcc

SEQ ID NO: 180024 - DNA, 12 bp, Unknown
  misc_feature (1)..( 12): Result.005 file - promoters50/2113462
tcacttaattcc

SEQ ID NO: 180025 - DNA, 12 bp, Unknown
  misc_feature (1)..( 12): Result.005 file - promoters50/2113462
aaacttaatata

SEQ ID NO: 180026 - DNA, 12 bp, Unknown
  misc_feature (1)..( 12): Result.005 file - promoters50/2113462
tatcttcatata

SEQ ID NO: 180027 - DNA, 12 bp, Unknown
  misc_feature (1)..( 12): Result.005 file - promoters50/2113462
aaatttattcac

SEQ ID NO: 180028 - DNA, 12 bp, Unknown
  misc_feature (1)..( 12): Result.005 file - promoters50/2113462
acatttagttta

SEQ ID NO: 180029 - DNA, 12 bp, Unknown
  misc_feature (1)..( 12): Result.005 file - promoters50/2113462
ggatttattaag

SEQ ID NO: 180030 - DNA, 13 bp, Unknown
  misc_feature (1)..( 13): Result.005 file - promoters50/2113462
tataaaaagagat

SEQ ID NO: 180031 - DNA, 13 bp, Unknown
  misc_feature (1)..( 13): Result.005 file - promoters50/2113462
tttaaaaaataat

SEQ ID NO: 180032 - DNA, 13 bp, Unknown
  misc_feature (1)..( 13): Result.005 file - promoters50/2113462
tataaaatcagat

SEQ ID NO: 180033 - DNA, 13 bp, Unknown
  misc_feature (1)..( 13): Result.005 file - promoters50/2113462
tttcaaactaaaa

SEQ ID NO: 180034 - DNA, 14 bp, Unknown
  misc_feature (1)..( 14): Result.005 file - promoters50/2113462
tttagaaaagtctc

SEQ ID NO: 180035 - DNA, 14 bp, Unknown
  misc_feature (1)..( 14): Result.005 file - promoters50/2113462
gagaaaaaacagaa

SEQ ID NO: 180036 - DNA, 14 bp, Unknown
  misc_feature (1)..( 14): Result.005 file - promoters50/2113462
tttaaaatcacatc

SEQ ID NO: 180037 - DNA, 13 bp, Unknown
  misc_feature (1)..( 13): Result.005 file - promoters50/2113462
aatcaactttttt

SEQ ID NO: 180038 - DNA, 13 bp, Unknown
  misc_feature (1)..( 13): Result.005 file - promoters50/2113462
ttatatcttttta

SEQ ID NO: 180039 - DNA, 14 bp, Unknown
  misc_feature (1)..( 14): Result.005 file - promoters50/2113462
aggtggcttatttc

SEQ ID NO: 180040 - DNA, 14 bp, Unknown
  misc_feature (1)..( 14): Result.005 file - promoters50/2113462
acttcacttttaaa

SEQ ID NO: 180041 - DNA, 14 bp, Unknown
  misc_feature (1)..( 14): Result.005 file - promoters50/2113462
aactaaattagttc

SEQ ID NO: 180042 - DNA, 14 bp, Unknown
  misc_feature (1)..( 14): Result.005 file - promoters50/2113462
aaccaaattagtga

SEQ ID NO: 180043 - DNA, 11 bp, Unknown
  misc_feature (1)..( 11): Result.005 file - promoters50/2113462
aacaaaattaa

SEQ ID NO: 180044 - DNA, 11 bp, Unknown
  misc_feature (1)..( 11): Result.005 file - promoters50/2113462
cttaaatttaa

SEQ ID NO: 180045 - DNA, 11 bp, Unknown
  misc_feature (1)..( 11): Result.005 file - promoters50/2113462
ggataaattac

SEQ ID NO: 180046 - DNA, 11 bp, Unknown
  misc_feature (1)..( 11): Result.005 file - promoters50/2113462
gctgaaattat

SEQ ID NO: 180047 - DNA, 11 bp, Unknown
  misc_feature (1)..( 11): Result.005 file - promoters50/2113462
tacaagatttt

SEQ ID NO: 180048 - DNA, 11 bp, Unknown
  misc_feature (1)..( 11): Result.005 file - promoters50/2113462
aacagaattat

SEQ ID NO: 180049 - DNA, 13 bp, Unknown
  misc_feature (1)..( 13): Result.005 file - promoters50/2113462
atccatatatgaa

SEQ ID NO: 180050 - DNA, 13 bp, Unknown
  misc_feature (1)..( 13): Result.005 file - promoters50/2113462
tctcatatacaaa

SEQ ID NO: 180051 - DNA, 13 bp, Unknown
  misc_feature (1)..( 13): Result.005 file - promoters50/2113462
atccttataaaac

SEQ ID NO: 180052 - DNA, 13 bp, Unknown
  misc_feature (1)..( 13): Result.005 file - promoters50/2113462
cttcacataggag

SEQ ID NO: 180053 - DNA, 13 bp, Unknown
  misc_feature (1)..( 13): Result.005 file - promoters50/2113462
aatttgataaaca

SEQ ID NO: 180054 - DNA, 13 bp, Unknown
  misc_feature (1)..( 13): Result.005 file - promoters50/2113462
agaggcctaaaca

SEQ ID NO: 180055 - DNA, 9 bp, Unknown
  misc_feature (1)..( 9): Result.005 file - promoters50/2113466
ataatatat

SEQ ID NO: 180056 - DNA, 9 bp, Unknown
  misc_feature (1)..( 9): Result.005 file - promoters50/2113466
agaatctat

SEQ ID NO: 180057 - DNA, 9 bp, Unknown
  misc_feature (1)..( 9): Result.005 file - promoters50/2113466
ataaaatat

SEQ ID NO: 180058 - DNA, 9 bp, Unknown
  misc_feature (1)..( 9): Result.005 file - promoters50/2113466
ctaaaataa

SEQ ID NO: 180059 - DNA, 9 bp, Unknown
  misc_feature (1)..( 9): Result.005 file - promoters50/2113466
atattataa

SEQ ID NO: 180060 - DNA, 10 bp, Unknown
  misc_feature (1)..( 10): Result.005 file - promoters50/2113466
tatttatgtt

SEQ ID NO: 180061 - DNA, 10 bp, Unknown
  misc_feature (1)..( 10): Result.005 file - promoters50/2113466
tgtttatgtt

SEQ ID NO: 180062 - DNA, 10 bp, Unknown
  misc_feature (1)..( 10): Result.005 file - promoters50/2113466
gattcatgat

SEQ ID NO: 180063 - DNA, 10 bp, Unknown
  misc_feature (1)..( 10): Result.005 file - promoters50/2113466
gattcaaaaa

SEQ ID NO: 180064 - DNA, 13 bp, Unknown
  misc_feature (1)..( 13): Result.005 file - promoters50/2113466
ccttttaactaca

SEQ ID NO: 180065 - DNA, 13 bp, Unknown
  misc_feature (1)..( 13): Result.005 file - promoters50/2113466
gcttgtaaccaca

SEQ ID NO: 180066 - DNA, 13 bp, Unknown
  misc_feature (1)..( 13): Result.005 file - promoters50/2113466
cctgttattggtc

SEQ ID NO: 180067 - DNA, 13 bp, Unknown
  misc_feature (1)..( 13): Result.005 file - promoters50/2113466
atttgtaataaca

SEQ ID NO: 180068 - DNA, 11 bp, Unknown
  misc_feature (1)..( 11): Result.005 file - promoters50/2113466
ctataacaata

SEQ ID NO: 180069 - DNA, 11 bp, Unknown
  misc_feature (1)..( 11): Result.005 file - promoters50/2113466
taataaccata

SEQ ID NO: 180070 - DNA, 11 bp, Unknown
  misc_feature (1)..( 11): Result.005 file - promoters50/2113466
aaataactcac

SEQ ID NO: 180071 - DNA, 11 bp, Unknown
  misc_feature (1)..( 11): Result.005 file - promoters50/2113466
aaataagtatt

SEQ ID NO: 180072 - DNA, 8 bp, Unknown
  misc_feature (1)..( 8): Result.005 file - promoters50/2113470
tattttaa

SEQ ID NO: 180073 - DNA, 8 bp, Unknown
  misc_feature (1)..( 8): Result.005 file - promoters50/2113470
tatattac

SEQ ID NO: 180074 - DNA, 8 bp, Unknown
  misc_feature (1)..( 8): Result.005 file - promoters50/2113470
acttttaa

SEQ ID NO: 180075 - DNA, 11 bp, Unknown
  misc_feature (1)..( 11): Result.005 file - promoters50/2113470
ttatatagtaa

SEQ ID NO: 180076 - DNA, 11 bp, Unknown
  misc_feature (1)..( 11): Result.005 file - promoters50/2113470
ttagatatttt

SEQ ID NO: 180077 - DNA, 11 bp, Unknown
  misc_feature (1)..( 11): Result.005 file - promoters50/2113470
ttatatatata

SEQ ID NO: 180078 - DNA, 7 bp, Unknown
  misc_feature (1)..( 7): Result.005 file - promoters50/2113470
tttatct

SEQ ID NO: 180079 - DNA, 7 bp, Unknown
  misc_feature (1)..( 7): Result.005 file - promoters50/2113470
attatct

SEQ ID NO: 180080 - DNA, 7 bp, Unknown
  misc_feature (1)..( 7): Result.005 file - promoters50/2113470
tttatca

SEQ ID NO: 180081 - DNA, 11 bp, Unknown
  misc_feature (1)..( 11): Result.005 file - promoters50/2113470
cccaaaagaat

SEQ ID NO: 180082 - DNA, 11 bp, Unknown
  misc_feature (1)..( 11): Result.005 file - promoters50/2113470
atcaaaagaat

SEQ ID NO: 180083 - DNA, 11 bp, Unknown
  misc_feature (1)..( 11): Result.005 file - promoters50/2113470
atccaaagccc

SEQ ID NO: 180084 - DNA, 9 bp, Unknown
  misc_feature (1)..( 9): Result.005 file - promoters50/2113470
tcacgaaac

SEQ ID NO: 180085 - DNA, 9 bp, Unknown
  misc_feature (1)..( 9): Result.005 file - promoters50/2113470
gcactaaac

SEQ ID NO: 180086 - DNA, 9 bp, Unknown
  misc_feature (1)..( 9): Result.005 file - promoters50/2113470
tcactaaat

SEQ ID NO: 180087 - DNA, 8 bp, Unknown
  misc_feature (1)..( 8): Result.005 file - promoters50/2113470
aaagttac

SEQ ID NO: 180088 - DNA, 8 bp, Unknown
  misc_feature (1)..( 8): Result.005 file - promoters50/2113470
aaaattat

SEQ ID NO: 180089 - DNA, 8 bp, Unknown
  misc_feature (1)..( 8): Result.005 file - promoters50/2113470
ctaattat

SEQ ID NO: 180090 - DNA, 10 bp, Unknown
  misc_feature (1)..( 10): Result.005 file - promoters50/2113477
aaagttaaaa

SEQ ID NO: 180091 - DNA, 10 bp, Unknown
  misc_feature (1)..( 10): Result.005 file - promoters50/2113477
caagtcaaat

SEQ ID NO: 180092 - DNA, 10 bp, Unknown
  misc_feature (1)..( 10): Result.005 file - promoters50/2113477
aaagttgccg

SEQ ID NO: 180093 - DNA, 10 bp, Unknown
  misc_feature (1)..( 10): Result.005 file - promoters50/2113477
aattttaaaa

SEQ ID NO: 180094 - DNA, 8 bp, Unknown
  misc_feature (1)..( 8): Result.005 file - promoters50/2113477
tattaaaa

SEQ ID NO: 180095 - DNA, 8 bp, Unknown
  misc_feature (1)..( 8): Result.005 file - promoters50/2113477
tatttaaa

SEQ ID NO: 180096 - DNA, 8 bp, Unknown
  misc_feature (1)..( 8): Result.005 file - promoters50/2113477
gtttaaaa

SEQ ID NO: 180097 - DNA, 8 bp, Unknown
  misc_feature (1)..( 8): Result.005 file - promoters50/2113477
tatttatt

SEQ ID NO: 180098 - DNA, 8 bp, Unknown
  misc_feature (1)..( 8): Result.005 file - promoters50/2113477
tatatatg

SEQ ID NO: 180099 - DNA, 8 bp, Unknown
  misc_feature (1)..( 8): Result.005 file - promoters50/2113477
aataataa

SEQ ID NO: 180100 - DNA, 8 bp, Unknown
  misc_feature (1)..( 8): Result.005 file - promoters50/2113477
aataatga

SEQ ID NO: 180101 - DNA, 8 bp, Unknown
  misc_feature (1)..( 8): Result.005 file - promoters50/2113477
tataatgg

SEQ ID NO: 180102 - DNA, 8 bp, Unknown
  misc_feature (1)..( 8): Result.005 file - promoters50/2113477
tatagaat

SEQ ID NO: 180103 - DNA, 11 bp, Unknown
  misc_feature (1)..( 11): Result.005 file - promoters50/2113477
ataatataatg

SEQ ID NO: 180104 - DNA, 11 bp, Unknown
  misc_feature (1)..( 11): Result.005 file - promoters50/2113477
ataatgtaata

SEQ ID NO: 180105 - DNA, 11 bp, Unknown
  misc_feature (1)..( 11): Result.005 file - promoters50/2113477
tagatataatg

SEQ ID NO: 180106 - DNA, 11 bp, Unknown
  misc_feature (1)..( 11): Result.005 file - promoters50/2113477
atagtatagaa

SEQ ID NO: 180107 - DNA, 7 bp, Unknown
  misc_feature (1)..( 7): Result.005 file - promoters50/2113477
gataaac

SEQ ID NO: 180108 - DNA, 7 bp, Unknown
  misc_feature (1)..( 7): Result.005 file - promoters50/2113477
tataaac

SEQ ID NO: 180109 - DNA, 7 bp, Unknown
  misc_feature (1)..( 7): Result.005 file - promoters50/2113477
gataaat

SEQ ID NO: 180110 - DNA, 7 bp, Unknown
  misc_feature (1)..( 7): Result.005 file - promoters50/2113477
aataaat

SEQ ID NO: 180111 - DNA, 19 bp, Unknown
  misc_feature (1)..( 19): Result.005 file - promoters50/2113481
tacaaaagattcattgttg

SEQ ID NO: 180112 - DNA, 19 bp, Unknown
  misc_feature (1)..( 19): Result.005 file - promoters50/2113481
cccaaatgatacatttggt

SEQ ID NO: 180113 - DNA, 19 bp, Unknown
  misc_feature (1)..( 19): Result.005 file - promoters50/2113481
tacaaaactacatattctg

SEQ ID NO: 180114 - DNA, 19 bp, Unknown
  misc_feature (1)..( 19): Result.005 file - promoters50/2113481
ttaaaaagaagaaactacg

SEQ ID NO: 180115 - DNA, 19 bp, Unknown
  misc_feature (1)..( 19): Result.005 file - promoters50/2113481
gccgtattacacatttttt

SEQ ID NO: 180116 - DNA, 19 bp, Unknown
  misc_feature (1)..( 19): Result.005 file - promoters50/2113481
tagtaaacataaatttgtt

SEQ ID NO: 180117 - DNA, 19 bp, Unknown
  misc_feature (1)..( 19): Result.005 file - promoters50/2113481
actagtaactaaattagta

SEQ ID NO: 180118 - DNA, 19 bp, Unknown
  misc_feature (1)..( 19): Result.005 file - promoters50/2113481
accaagggtttgattggtt

SEQ ID NO: 180119 - DNA, 12 bp, Unknown
  misc_feature (1)..( 12): Result.005 file - promoters50/2113481
ttatataaagct

SEQ ID NO: 180120 - DNA, 12 bp, Unknown
  misc_feature (1)..( 12): Result.005 file - promoters50/2113481
ttaaataacaac

SEQ ID NO: 180121 - DNA, 12 bp, Unknown
  misc_feature (1)..( 12): Result.005 file - promoters50/2113481
tttaataacttt

SEQ ID NO: 180122 - DNA, 12 bp, Unknown
  misc_feature (1)..( 12): Result.005 file - promoters50/2113481
gccaatcacaca

SEQ ID NO: 180123 - DNA, 12 bp, Unknown
  misc_feature (1)..( 12): Result.005 file - promoters50/2113481
atggataacttg

SEQ ID NO: 180124 - DNA, 12 bp, Unknown
  misc_feature (1)..( 12): Result.005 file - promoters50/2113481
ctagagaacttg

SEQ ID NO: 180125 - DNA, 12 bp, Unknown
  misc_feature (1)..( 12): Result.005 file - promoters50/2113481
tgtaataaacga

SEQ ID NO: 180126 - DNA, 13 bp, Unknown
  misc_feature (1)..( 13): Result.005 file - promoters50/2113481
ttaatttcatttg

SEQ ID NO: 180127 - DNA, 13 bp, Unknown
  misc_feature (1)..( 13): Result.005 file - promoters50/2113481
tttatttcaactc

SEQ ID NO: 180128 - DNA, 13 bp, Unknown
  misc_feature (1)..( 13): Result.005 file - promoters50/2113481
ctaatttaatttg

SEQ ID NO: 180129 - DNA, 13 bp, Unknown
  misc_feature (1)..( 13): Result.005 file - promoters50/2113481
aaaatttctatca

SEQ ID NO: 180130 - DNA, 13 bp, Unknown
  misc_feature (1)..( 13): Result.005 file - promoters50/2113481
tacatttcatatg

SEQ ID NO: 180131 - DNA, 13 bp, Unknown
  misc_feature (1)..( 13): Result.005 file - promoters50/2113481
tacacttcctttt

SEQ ID NO: 180132 - DNA, 14 bp, Unknown
  misc_feature (1)..( 14): Result.005 file - promoters50/2113481
tataaatacataga

SEQ ID NO: 180133 - DNA, 14 bp, Unknown
  misc_feature (1)..( 14): Result.005 file - promoters50/2113481
tataaatagatgac

SEQ ID NO: 180134 - DNA, 14 bp, Unknown
  misc_feature (1)..( 14): Result.005 file - promoters50/2113481
tataaatatgagac

SEQ ID NO: 180135 - DNA, 14 bp, Unknown
  misc_feature (1)..( 14): Result.005 file - promoters50/2113481
tacaaatatataga

SEQ ID NO: 180136 - DNA, 14 bp, Unknown
  misc_feature (1)..( 14): Result.005 file - promoters50/2113481
tatatatagaaaca

SEQ ID NO: 180137 - DNA, 14 bp, Unknown
  misc_feature (1)..( 14): Result.005 file - promoters50/2113481
tataaacttcagat

SEQ ID NO: 180138 - DNA, 12 bp, Unknown
  misc_feature (1)..( 12): Result.005 file - promoters50/2113481
cgttgtttatac

SEQ ID NO: 180139 - DNA, 12 bp, Unknown
  misc_feature (1)..( 12): Result.005 file - promoters50/2113481
attagttaatat

SEQ ID NO: 180140 - DNA, 12 bp, Unknown
  misc_feature (1)..( 12): Result.005 file - promoters50/2113481
tttattttctac

SEQ ID NO: 180141 - DNA, 13 bp, Unknown
  misc_feature (1)..( 13): Result.005 file - promoters50/2113481
aattagtagataa

SEQ ID NO: 180142 - DNA, 13 bp, Unknown
  misc_feature (1)..( 13): Result.005 file - promoters50/2113481
atttgttaatttt

SEQ ID NO: 180143 - DNA, 13 bp, Unknown
  misc_feature (1)..( 13): Result.005 file - promoters50/2113481
aagaggtaaataa

SEQ ID NO: 180144 - DNA, 12 bp, Unknown
  misc_feature (1)..( 12): Result.005 file - promoters50/2113481
ggaagtataagt

SEQ ID NO: 180145 - DNA, 12 bp, Unknown
  misc_feature (1)..( 12): Result.005 file - promoters50/2113481
ataagtttaacg

SEQ ID NO: 180146 - DNA, 12 bp, Unknown
  misc_feature (1)..( 12): Result.005 file - promoters50/2113481
attggtttaaaa

SEQ ID NO: 180147 - DNA, 12 bp, Unknown
  misc_feature (1)..( 12): Result.005 file - promoters50/2113481
ttgagtttaggc

SEQ ID NO: 180148 - DNA, 12 bp, Unknown
  misc_feature (1)..( 12): Result.005 file - promoters50/2113481
ataaatttgtta

SEQ ID NO: 180149 - DNA, 12 bp, Unknown
  misc_feature (1)..( 12): Result.005 file - promoters50/2113481
ctttatttaaaa

SEQ ID NO: 180150 - DNA, 9 bp, Unknown
  misc_feature (1)..( 9): Result.005 file - promoters50/2113489
tacaaattt

SEQ ID NO: 180151 - DNA, 9 bp, Unknown
  misc_feature (1)..( 9): Result.005 file - promoters50/2113489
tacaatttt

SEQ ID NO: 180152 - DNA, 9 bp, Unknown
  misc_feature (1)..( 9): Result.005 file - promoters50/2113489
tataattta

SEQ ID NO: 180153 - DNA, 11 bp, Unknown
  misc_feature (1)..( 11): Result.005 file - promoters50/2113489
tttaattttac

SEQ ID NO: 180154 - DNA, 11 bp, Unknown
  misc_feature (1)..( 11): Result.005 file - promoters50/2113489
gttttttttac

SEQ ID NO: 180155 - DNA, 11 bp, Unknown
  misc_feature (1)..( 11): Result.005 file - promoters50/2113489
tttcattttaa

SEQ ID NO: 180156 - DNA, 9 bp, Unknown
  misc_feature (1)..( 9): Result.005 file - promoters50/2113489
gtgcacaaa

SEQ ID NO: 180157 - DNA, 9 bp, Unknown
  misc_feature (1)..( 9): Result.005 file - promoters50/2113489
tggcagaaa

SEQ ID NO: 180158 - DNA, 9 bp, Unknown
  misc_feature (1)..( 9): Result.005 file - promoters50/2113489
tggcagatc

SEQ ID NO: 180159 - DNA, 8 bp, Unknown
  misc_feature (1)..( 8): Result.005 file - promoters50/2113489
tattactc

SEQ ID NO: 180160 - DNA, 8 bp, Unknown
  misc_feature (1)..( 8): Result.005 file - promoters50/2113489
aattacta

SEQ ID NO: 180161 - DNA, 8 bp, Unknown
  misc_feature (1)..( 8): Result.005 file - promoters50/2113489
aattacta

SEQ ID NO: 180162 - DNA, 12 bp, Unknown
  misc_feature (1)..( 12): Result.005 file - promoters50/2113502
tctcaaaacatt

SEQ ID NO: 180163 - DNA, 12 bp, Unknown
  misc_feature (1)..( 12): Result.005 file - promoters50/2113502
gatgtaaaaatt

SEQ ID NO: 180164 - DNA, 12 bp, Unknown
  misc_feature (1)..( 12): Result.005 file - promoters50/2113502
aaaaccaacatt

SEQ ID NO: 180165 - DNA, 12 bp, Unknown
  misc_feature (1)..( 12): Result.005 file - promoters50/2113502
atttcaaaaata

SEQ ID NO: 180166 - DNA, 12 bp, Unknown
  misc_feature (1)..( 12): Result.005 file - promoters50/2113502
acgttaaaaata

SEQ ID NO: 180167 - DNA, 12 bp, Unknown
  misc_feature (1)..( 12): Result.005 file - promoters50/2113502
acaataaaagtt

SEQ ID NO: 180168 - DNA, 14 bp, Unknown
  misc_feature (1)..( 14): Result.005 file - promoters50/2113502
ccaacgaaacgatt

SEQ ID NO: 180169 - DNA, 14 bp, Unknown
  misc_feature (1)..( 14): Result.005 file - promoters50/2113502
ttaacaaaacaatt

SEQ ID NO: 180170 - DNA, 14 bp, Unknown
  misc_feature (1)..( 14): Result.005 file - promoters50/2113502
gcaaccaaaagaat

SEQ ID NO: 180171 - DNA, 14 bp, Unknown
  misc_feature (1)..( 14): Result.005 file - promoters50/2113502
acaaagaaacaaac

SEQ ID NO: 180172 - DNA, 14 bp, Unknown
  misc_feature (1)..( 14): Result.005 file - promoters50/2113502
agaacgaaatatct

SEQ ID NO: 180173 - DNA, 14 bp, Unknown
  misc_feature (1)..( 14): Result.005 file - promoters50/2113502
ttatcaaattgact

SEQ ID NO: 180174 - DNA, 14 bp, Unknown
  misc_feature (1)..( 14): Result.005 file - promoters50/2113502
gcaattctgacgcc

SEQ ID NO: 180175 - DNA, 11 bp, Unknown
  misc_feature (1)..( 11): Result.005 file - promoters50/2113502
tatataaatcc

SEQ ID NO: 180176 - DNA, 11 bp, Unknown
  misc_feature (1)..( 11): Result.005 file - promoters50/2113502
tttatgaatcc

SEQ ID NO: 180177 - DNA, 11 bp, Unknown
  misc_feature (1)..( 11): Result.005 file - promoters50/2113502
actataaatac

SEQ ID NO: 180178 - DNA, 11 bp, Unknown
  misc_feature (1)..( 11): Result.005 file - promoters50/2113502
actataaacaa

SEQ ID NO: 180179 - DNA, 11 bp, Unknown
  misc_feature (1)..( 11): Result.005 file - promoters50/2113502
actataaaact

SEQ ID NO: 180180 - DNA, 12 bp, Unknown
  misc_feature (1)..( 12): Result.005 file - promoters50/2113502
actattaaagcc

SEQ ID NO: 180181 - DNA, 11 bp, Unknown
  misc_feature (1)..( 11): Result.005 file - promoters50/2113592
tttttagatca

SEQ ID NO: 180182 - DNA, 11 bp, Unknown
  misc_feature (1)..( 11): Result.005 file - promoters50/2113592
cagttagatct

SEQ ID NO: 180183 - DNA, 11 bp, Unknown
  misc_feature (1)..( 11): Result.005 file - promoters50/2113592
tttatagattg

SEQ ID NO: 180184 - DNA, 11 bp, Unknown
  misc_feature (1)..( 11): Result.005 file - promoters50/2113592
ccaataaatta

SEQ ID NO: 180185 - DNA, 11 bp, Unknown
  misc_feature (1)..( 11): Result.005 file - promoters50/2113592
tatataattta

SEQ ID NO: 180186 - DNA, 11 bp, Unknown
  misc_feature (1)..( 11): Result.005 file - promoters50/2113592
gaaaaatcatt

SEQ ID NO: 180187 - DNA, 11 bp, Unknown
  misc_feature (1)..( 11): Result.005 file - promoters50/2113592
tataaataatt

SEQ ID NO: 180188 - DNA, 11 bp, Unknown
  misc_feature (1)..( 11): Result.005 file - promoters50/2113592
attaaataacc

SEQ ID NO: 180189 - DNA, 11 bp, Unknown
  misc_feature (1)..( 11): Result.005 file - promoters50/2113592
tctaaataaag

SEQ ID NO: 180190 - DNA, 11 bp, Unknown
  misc_feature (1)..( 11): Result.005 file - promoters50/2113592
tatacatatta

SEQ ID NO: 180191 - DNA, 11 bp, Unknown
  misc_feature (1)..( 11): Result.005 file - promoters50/2113592
attaaaaaaaa

SEQ ID NO: 180192 - DNA, 10 bp, Unknown
  misc_feature (1)..( 10): Result.005 file - promoters50/2113592
attaaataac

SEQ ID NO: 180193 - DNA, 10 bp, Unknown
  misc_feature (1)..( 10): Result.005 file - promoters50/2113592
aaaaaaaaac

SEQ ID NO: 180194 - DNA, 10 bp, Unknown
  misc_feature (1)..( 10): Result.005 file - promoters50/2113592
tataaataat

SEQ ID NO: 180195 - DNA, 10 bp, Unknown
  misc_feature (1)..( 10): Result.005 file - promoters50/2113592
tctaaataaa

SEQ ID NO: 180196 - DNA, 10 bp, Unknown
  misc_feature (1)..( 10): Result.005 file - promoters50/2113592
tatacatatt

SEQ ID NO: 180197 - DNA, 19 bp, Unknown
  misc_feature (1)..( 19): Result.005 file - promoters50/2113596
caactactctatcaattat

SEQ ID NO: 180198 - DNA, 19 bp, Unknown
  misc_feature (1)..( 19): Result.005 file - promoters50/2113596
caattactctatcaattat

SEQ ID NO: 180199 - DNA, 19 bp, Unknown
  misc_feature (1)..( 19): Result.005 file - promoters50/2113596
gtactactatacaagtaac

SEQ ID NO: 180200 - DNA, 38 bp, Unknown; identical to SEQ ID NO: 126430
  misc_feature (1)..( 38): Result.005 file - promoters50/2113596

SEQ ID NO: 180201 - DNA, 38 bp, Unknown; identical to SEQ ID NO: 126431
  misc_feature (1)..( 38): Result.005 file - promoters50/2113596

SEQ ID NO: 180202 - DNA, 38 bp, Unknown
  misc_feature (1)..( 38): Result.005 file - promoters50/2113596
tagtgactataaaaatagttaatgagtgctaaaaaaag

SEQ ID NO: 180203 - DNA, 7 bp, Unknown
  misc_feature (1)..( 7): Result.005 file - promoters50/2113596
ccaaaat

SEQ ID NO: 180204 - DNA, 7 bp, Unknown
  misc_feature (1)..( 7): Result.005 file - promoters50/2113596
tcaaaat

SEQ ID NO: 180205 - DNA, 7 bp, Unknown
  misc_feature (1)..( 7): Result.005 file - promoters50/2113596
tcaaaat

SEQ ID NO: 180206 - DNA, 8 bp, Unknown
  misc_feature (1)..( 8): Result.005 file - promoters50/2113596
aacaacga

SEQ ID NO: 180207 - DNA, 8 bp, Unknown
  misc_feature (1)..( 8): Result.005 file - promoters50/2113596
aacaacaa

SEQ ID NO: 180208 - DNA, 8 bp, Unknown
  misc_feature (1)..( 8): Result.005 file - promoters50/2113596
aacaacaa

SEQ ID NO: 180209 - DNA, 8 bp, Unknown
  misc_feature (1)..( 8): Result.005 file - promoters50/2113620
gaaggaag

SEQ ID NO: 180210 - DNA, 8 bp, Unknown
  misc_feature (1)..( 8): Result.005 file - promoters50/2113620
aaagaaag

SEQ ID NO: 180211 - DNA, 8 bp, Unknown
  misc_feature (1)..( 8): Result.005 file - promoters50/2113620
gaatgaat

SEQ ID NO: 180212 - DNA, 10 bp, Unknown
  misc_feature (1)..( 10): Result.005 file - promoters50/2113624
ttcatttttt

SEQ ID NO: 180213 - DNA, 10 bp, Unknown
  misc_feature (1)..( 10): Result.005 file - promoters50/2113624
atcaatttac

SEQ ID NO: 180214 - DNA, 10 bp, Unknown
  misc_feature (1)..( 10): Result.005 file - promoters50/2113624
ttaatttttt

SEQ ID NO: 180215 - DNA, 10 bp, Unknown
  misc_feature (1)..( 10): Result.005 file - promoters50/2113624
ttcattctct

SEQ ID NO: 180216 - DNA, 10 bp, Unknown
  misc_feature (1)..( 10): Result.005 file - promoters50/2113624
ttgatttttc

SEQ ID NO: 180217 - DNA, 10 bp, Unknown
  misc_feature (1)..( 10): Result.005 file - promoters50/2113624
tctattcttc

SEQ ID NO: 180218 - DNA, 11 bp, Unknown
  misc_feature (1)..( 11): Result.005 file - promoters50/2113640
taaaattaaga

SEQ ID NO: 180219 - DNA, 11 bp, Unknown
  misc_feature (1)..( 11): Result.005 file - promoters50/2113640
gataatgaagg

SEQ ID NO: 180220 - DNA, 11 bp, Unknown
  misc_feature (1)..( 11): Result.005 file - promoters50/2113640
aaaaaataatt

SEQ ID NO: 180221 - DNA, 11 bp, Unknown
  misc_feature (1)..( 11): Result.005 file - promoters50/2113640
gtaaaatatta

SEQ ID NO: 180222 - DNA, 11 bp, Unknown
  misc_feature (1)..( 11): Result.005 file - promoters50/2113640
tcaaaatataa

SEQ ID NO: 180223 - DNA, 11 bp, Unknown
  misc_feature (1)..( 11): Result.005 file - promoters50/2113640
ttttaatatat

SEQ ID NO: 180224 - DNA, 11 bp, Unknown
  misc_feature (1)..( 11): Result.005 file - promoters50/2113640
tttcaataact

SEQ ID NO: 180225 - DNA, 10 bp, Unknown
  misc_feature (1)..( 10): Result.005 file - promoters50/2113640
gaataaacaa

SEQ ID NO: 180226 - DNA, 10 bp, Unknown
  misc_feature (1)..( 10): Result.005 file - promoters50/2113640
ctatatacac

SEQ ID NO: 180227 - DNA, 10 bp, Unknown
  misc_feature (1)..( 10): Result.005 file - promoters50/2113640
gtgtaaacac

SEQ ID NO: 180228 - DNA, 10 bp, Unknown
  misc_feature (1)..( 10): Result.005 file - promoters50/2113640
aaataaacaa

SEQ ID NO: 180229 - DNA, 10 bp, Unknown
  misc_feature (1)..( 10): Result.005 file - promoters50/2113640
atatctacat

SEQ ID NO: 180230 - DNA, 10 bp, Unknown
  misc_feature (1)..( 10): Result.005 file - promoters50/2113640
atatataata

SEQ ID NO: 180231 - DNA, 10 bp, Unknown
  misc_feature (1)..( 10): Result.005 file - promoters50/2113640
aaataaaaga

SEQ ID NO: 180232 - DNA, 11 bp, Unknown
  misc_feature (1)..( 11): Result.005 file - promoters50/2113640
ataaaatttat

SEQ ID NO: 180233 - DNA, 11 bp, Unknown
  misc_feature (1)..( 11): Result.005 file - promoters50/2113640
ccaaaattaca

SEQ ID NO: 180234 - DNA, 11 bp, Unknown
  misc_feature (1)..( 11): Result.005 file - promoters50/2113640
gaaaaataaca

SEQ ID NO: 180235 - DNA, 11 bp, Unknown
  misc_feature (1)..( 11): Result.005 file - promoters50/2113640
ccacaataatt

SEQ ID NO: 180236 - DNA, 11 bp, Unknown
  misc_feature (1)..( 11): Result.005 file - promoters50/2113640
tttaaattaat

SEQ ID NO: 180237 - DNA, 11 bp, Unknown
  misc_feature (1)..( 11): Result.005 file - promoters50/2113640
gaaaaataaaa

SEQ ID NO: 180238 - DNA, 8 bp, Unknown
  misc_feature (1)..( 8): Result.005 file - promoters50/2113675
gaaaaaat

SEQ ID NO: 180239 - DNA, 8 bp, Unknown
  misc_feature (1)..( 8): Result.005 file - promoters50/2113675
gaagaaat

SEQ ID NO: 180240 - DNA, 8 bp, Unknown
  misc_feature (1)..( 8): Result.005 file - promoters50/2113675
aaagaaag

SEQ ID NO: 180241 - DNA, 8 bp, Unknown
  misc_feature (1)..( 8): Result.005 file - promoters50/2113675
gtgtagag

SEQ ID NO: 180242 - DNA, 8 bp, Unknown
  misc_feature (1)..( 8): Result.005 file - promoters50/2113675
gtggagaa

SEQ ID NO: 180243 - DNA, 8 bp, Unknown
  misc_feature (1)..( 8): Result.005 file - promoters50/2113675
gtagagaa

SEQ ID NO: 180244 - DNA, 9 bp, Unknown
  misc_feature (1)..( 9): Result.005 file - promoters50/2113675
gtagagaac

SEQ ID NO: 180245 - DNA, 9 bp, Unknown
  misc_feature (1)..( 9): Result.005 file - promoters50/2113675
gtggagaac

SEQ ID NO: 180246 - DNA, 9 bp, Unknown
  misc_feature (1)..( 9): Result.005 file - promoters50/2113675
gtagagaaa

SEQ ID NO: 180247 - DNA, 8 bp, Unknown
  misc_feature (1)..( 8): Result.005 file - promoters50/2113675
ttaaaatc

SEQ ID NO: 180248 - DNA, 8 bp, Unknown
  misc_feature (1)..( 8): Result.005 file - promoters50/2113675
tcaaaatc

SEQ ID NO: 180249 - DNA, 8 bp, Unknown
  misc_feature (1)..( 8): Result.005 file - promoters50/2113675
ttataatg

SEQ ID NO: 180250 - DNA, 8 bp, Unknown
  misc_feature (1)..( 8): Result.005 file - promoters50/2113695
aaaagaaa

SEQ ID NO: 180251 - DNA, 8 bp, Unknown
  misc_feature (1)..( 8): Result.005 file - promoters50/2113695
gaaaaaaa

SEQ ID NO: 180252 - DNA, 8 bp, Unknown
  misc_feature (1)..( 8): Result.005 file - promoters50/2113695
gaaaaagc

SEQ ID NO: 180253 - DNA, 8 bp, Unknown
  misc_feature (1)..( 8): Result.005 file - promoters50/2113695
attacaaa

SEQ ID NO: 180254 - DNA, 8 bp, Unknown
  misc_feature (1)..( 8): Result.005 file - promoters50/2113695
gttaaaaa

SEQ ID NO: 180255 - DNA, 8 bp, Unknown
  misc_feature (1)..( 8): Result.005 file - promoters50/2113695
gttaaagc

SEQ ID NO: 180256 - DNA, 8 bp, Unknown
  misc_feature (1)..( 8): Result.005 file - promoters50/2113695
tttcattt

SEQ ID NO: 180257 - DNA, 8 bp, Unknown
  misc_feature (1)..( 8): Result.005 file - promoters50/2113695
attcattt

SEQ ID NO: 180258 - DNA, 9 bp, Unknown
  misc_feature (1)..( 9): Result.005 file - promoters50/2113695
tttccatat

SEQ ID NO: 180259 - DNA, 8 bp, Unknown
  misc_feature (1)..( 8): Result.005 file - promoters50/2113695
cttaattc

SEQ ID NO: 180260 - DNA, 8 bp, Unknown
  misc_feature (1)..( 8): Result.005 file - promoters50/2113695
tttaattc

SEQ ID NO: 180261 - DNA, 9 bp, Unknown
  misc_feature (1)..( 9): Result.005 file - promoters50/2113695
attaaattg

SEQ ID NO: 180262 - DNA, 12 bp, Unknown
  misc_feature (1)..( 12): Result.005 file - promoters50/2113695
aacatgttttaa

SEQ ID NO: 180263 - DNA, 12 bp, Unknown
  misc_feature (1)..( 12): Result.005 file - promoters50/2113695
aacatgtttttg

SEQ ID NO: 180264 - DNA, 12 bp, Unknown
  misc_feature (1)..( 12): Result.005 file - promoters50/2113695
attttgttataa

SEQ ID NO: 180265 - DNA, 9 bp, Unknown
  misc_feature (1)..( 9): Result.005 file - promoters50/2113695
tgttttaaa

SEQ ID NO: 180266 - DNA, 9 bp, Unknown
  misc_feature (1)..( 9): Result.005 file - promoters50/2113695
tttttgaaa

SEQ ID NO: 180267 - DNA, 9 bp, Unknown
  misc_feature (1)..( 9): Result.005 file - promoters50/2113695
tgttataac

SEQ ID NO: 180268 - DNA, 7 bp, Unknown
  misc_feature (1)..( 7): Result.005 file - promoters50/2113695
cgaaaag

SEQ ID NO: 180269 - DNA, 7 bp, Unknown
  misc_feature (1)..( 7): Result.005 file - promoters50/2113695
cgaaaaa

SEQ ID NO: 180270 - DNA, 7 bp, Unknown
  misc_feature (1)..( 7): Result.005 file - promoters50/2113695
ggaaaaa

SEQ ID NO: 180271 - DNA, 7 bp, Unknown
  misc_feature (1)..( 7): Result.005 file - promoters50/2113695
ccataag

SEQ ID NO: 180272 - DNA, 7 bp, Unknown
  misc_feature (1)..( 7): Result.005 file - promoters50/2113695
acataag

SEQ ID NO: 180273 - DNA, 7 bp, Unknown
  misc_feature (1)..( 7): Result.005 file - promoters50/2113695
acataac

SEQ ID NO: 180274 - DNA, 10 bp, Unknown
  misc_feature (1)..( 10): Result.005 file - promoters50/2113695
tttttcttaa

SEQ ID NO: 180275 - DNA, 10 bp, Unknown
  misc_feature (1)..( 10): Result.005 file - promoters50/2113695
ttttttttaa

SEQ ID NO: 180276 - DNA, 10 bp, Unknown
  misc_feature (1)..( 10): Result.005 file - promoters50/2113695
gatttcttga

SEQ ID NO: 180277 - DNA, 9 bp, Unknown
  misc_feature (1)..( 9): Result.005 file - promoters50/2113734
aaagtttaa

SEQ ID NO: 180278 - DNA, 9 bp, Unknown
  misc_feature (1)..( 9): Result.005 file - promoters50/2113734
aaactttat

SEQ ID NO: 180279 - DNA, 9 bp, Unknown
  misc_feature (1)..( 9): Result.005 file - promoters50/2113734
ggtgtttaa

SEQ ID NO: 180280 - DNA, 9 bp, Unknown
  misc_feature (1)..( 9): Result.005 file - promoters50/2113734
aattaaaaa

SEQ ID NO: 180281 - DNA, 9 bp, Unknown
  misc_feature (1)..( 9): Result.005 file - promoters50/2113734
aattaaaga

SEQ ID NO: 180282 - DNA, 9 bp, Unknown
  misc_feature (1)..( 9): Result.005 file - promoters50/2113734
tgttagaga

SEQ ID NO: 180283 - DNA, 8 bp, Unknown
  misc_feature (1)..( 8): Result.005 file - promoters50/2113748
tatcttta

SEQ ID NO: 180284 - DNA, 8 bp, Unknown
  misc_feature (1)..( 8): Result.005 file - promoters50/2113748
tatttttt

SEQ ID NO: 180285 - DNA, 8 bp, Unknown
  misc_feature (1)..( 8): Result.005 file - promoters50/2113748
aatttttt

SEQ ID NO: 180286 - DNA, 10 bp, Unknown
  misc_feature (1)..( 10): Result.005 file - promoters50/2113748
cattttgctg

SEQ ID NO: 180287 - DNA, 10 bp, Unknown
  misc_feature (1)..( 10): Result.005 file - promoters50/2113748
tattttactg

SEQ ID NO: 180288 - DNA, 10 bp, Unknown
  misc_feature (1)..( 10): Result.005 file - promoters50/2113748
tattttttta

SEQ ID NO: 180289 - DNA, 8 bp, Unknown
  misc_feature (1)..( 8): Result.005 file - promoters50/2113748
acaatttc

SEQ ID NO: 180290 - DNA, 8 bp, Unknown
  misc_feature (1)..( 8): Result.005 file - promoters50/2113748
caaatttc

SEQ ID NO: 180291 - DNA, 8 bp, Unknown
  misc_feature (1)..( 8): Result.005 file - promoters50/2113748
caaatttt

SEQ ID NO: 180292 - DNA, 9 bp, Unknown
  misc_feature (1)..( 9): Result.005 file - promoters50/2113748
acttaaaaa

SEQ ID NO: 180293 - DNA, 9 bp, Unknown
  misc_feature (1)..( 9): Result.005 file - promoters50/2113748
actcaaaaa

SEQ ID NO: 180294 - DNA, 9 bp, Unknown
  misc_feature (1)..( 9): Result.005 file - promoters50/2113748
cctcaaaag

SEQ ID NO: 180295 - DNA, 9 bp, Unknown
  misc_feature (1)..( 9): Result.005 file - promoters50/2113772
cataaaact

SEQ ID NO: 180296 - DNA, 9 bp, Unknown
  misc_feature (1)..( 9): Result.005 file - promoters50/2113772
ttcaaaact

SEQ ID NO: 180297 - DNA, 9 bp, Unknown
  misc_feature (1)..( 9): Result.005 file - promoters50/2113772
ttcaaaaca

SEQ ID NO: 180298 - DNA, 9 bp, Unknown
  misc_feature (1)..( 9): Result.005 file - promoters50/2113817
gaagtaaat

SEQ ID NO: 180299 - DNA, 9 bp, Unknown
  misc_feature (1)..( 9): Result.005 file - promoters50/2113817
gaaataaca

SEQ ID NO: 180300 - DNA, 9 bp, Unknown
  misc_feature (1)..( 9): Result.005 file - promoters50/2113817
gaaataaat

SEQ ID NO: 180301 - DNA, 7 bp, Unknown
  misc_feature (1)..( 7): Result.005 file - promoters50/2113817
tcgttat

SEQ ID NO: 180302 - DNA, 7 bp, Unknown
  misc_feature (1)..( 7): Result.005 file - promoters50/2113817
acgttat

SEQ ID NO: 180303 - DNA, 7 bp, Unknown
  misc_feature (1)..( 7): Result.005 file - promoters50/2113817
acgttat

SEQ ID NO: 180304 - DNA, 7 bp, Unknown
  misc_feature (1)..( 7): Result.005 file - promoters50/2113817
aaaatag

SEQ ID NO: 180305 - DNA, 7 bp, Unknown
  misc_feature (1)..( 7): Result.005 file - promoters50/2113817
aaaataa

SEQ ID NO: 180306 - DNA, 7 bp, Unknown
  misc_feature (1)..( 7): Result.005 file - promoters50/2113817
aaattaa

SEQ ID NO: 180307 - DNA, 7 bp, Unknown
  misc_feature (1)..( 7): Result.005 file - promoters50/2113817
aaaatga

SEQ ID NO: 180308 - DNA, 7 bp, Unknown
  misc_feature (1)..( 7): Result.005 file - promoters50/2113817
aaattga

SEQ ID NO: 180309 - DNA, 7 bp, Unknown
  misc_feature (1)..( 7): Result.005 file - promoters50/2113817
taattga

SEQ ID NO: 180310 - DNA, 13 bp, Unknown
  misc_feature (1)..( 13): Result.005 file - promoters50/2113839
atttataaagaaa

SEQ ID NO: 180311 - DNA, 13 bp, Unknown
  misc_feature (1)..( 13): Result.005 file - promoters50/2113839
attaacaaataaa

SEQ ID NO: 180312 - DNA, 13 bp, Unknown
  misc_feature (1)..( 13): Result.005 file - promoters50/2113839
tattacaaaaaaa

SEQ ID NO: 180313 - DNA, 13 bp, Unknown
  misc_feature (1)..( 13): Result.005 file - promoters50/2113839
attcataaaaaaa

SEQ ID NO: 180314 - DNA, 13 bp, Unknown
  misc_feature (1)..( 13): Result.005 file - promoters50/2113839
cagaaaaaagaaa

SEQ ID NO: 180315 - DNA, 13 bp, Unknown
  misc_feature (1)..( 13): Result.005 file - promoters50/2113839
actatgaaataac

SEQ ID NO: 180316 - DNA, 13 bp, Unknown
  misc_feature (1)..( 13): Result.005 file - promoters50/2113839
ccctattaatatt

SEQ ID NO: 180317 - DNA, 13 bp, Unknown
  misc_feature (1)..( 13): Result.005 file - promoters50/2113839
gggcattaaaagg

SEQ ID NO: 180318 - DNA, 11 bp, Unknown
  misc_feature (1)..( 11): Result.005 file - promoters50/2113839
aaagaaccaat

SEQ ID NO: 180319 - DNA, 11 bp, Unknown
  misc_feature (1)..( 11): Result.005 file - promoters50/2113839
cattaacaaat

SEQ ID NO: 180320 - DNA, 11 bp, Unknown
  misc_feature (1)..( 11): Result.005 file - promoters50/2113839
aaataacaatt

SEQ ID NO: 180321 - DNA, 11 bp, Unknown
  misc_feature (1)..( 11): Result.005 file - promoters50/2113839
tcataaaaaaa

SEQ ID NO: 180322 - DNA, 11 bp, Unknown
  misc_feature (1)..( 11): Result.005 file - promoters50/2113839
agaaaacaatt

SEQ ID NO: 180323 - DNA, 11 bp, Unknown
  misc_feature (1)..( 11): Result.005 file - promoters50/2113839
cattaaaagga

SEQ ID NO: 180324 - DNA, 10 bp, Unknown
  misc_feature (1)..( 10): Result.005 file - promoters50/2113839
aaatatattt

SEQ ID NO: 180325 - DNA, 10 bp, Unknown
  misc_feature (1)..( 10): Result.005 file - promoters50/2113839
aaacatatct

SEQ ID NO: 180326 - DNA, 10 bp, Unknown
  misc_feature (1)..( 10): Result.005 file - promoters50/2113839
tcctatattt

SEQ ID NO: 180327 - DNA, 10 bp, Unknown
  misc_feature (1)..( 10): Result.005 file - promoters50/2113839
ttatatattg

SEQ ID NO: 180328 - DNA, 10 bp, Unknown
  misc_feature (1)..( 10): Result.005 file - promoters50/2113839
aaaaatagtc

SEQ ID NO: 180329 - DNA, 10 bp, Unknown
  misc_feature (1)..( 10): Result.005 file - promoters50/2113839
aaaaaagaat

SEQ ID NO: 180330 - DNA, 13 bp, Unknown
  misc_feature (1)..( 13): Result.005 file - promoters50/2113839
agataaaatccat

SEQ ID NO: 180331 - DNA, 13 bp, Unknown
  misc_feature (1)..( 13): Result.005 file - promoters50/2113839
agaaaaaagaaag

SEQ ID NO: 180332 - DNA, 13 bp, Unknown
  misc_feature (1)..( 13): Result.005 file - promoters50/2113839
atatatatagata

SEQ ID NO: 180333 - DNA, 13 bp, Unknown
  misc_feature (1)..( 13): Result.005 file - promoters50/2113839
caatacaatacat

SEQ ID NO: 180334 - DNA, 13 bp, Unknown
  misc_feature (1)..( 13): Result.005 file - promoters50/2113839
taaaacaatatct

SEQ ID NO: 180335 - DNA, 13 bp, Unknown
  misc_feature (1)..( 13): Result.005 file - promoters50/2113839
agatacaacaact

SEQ ID NO: 180336 - DNA, 7 bp, Unknown
  misc_feature (1)..( 7): Result.005 file - promoters50/2113842
ttttcac

SEQ ID NO: 180337 - DNA, 7 bp, Unknown
  misc_feature (1)..( 7): Result.005 file - promoters50/2113842
ttttcaa

SEQ ID NO: 180338 - DNA, 8 bp, Unknown
  misc_feature (1)..( 8): Result.005 file - promoters50/2113842
tttgtcaa

SEQ ID NO: 180339 - DNA, 8 bp, Unknown
  misc_feature (1)..( 8): Result.005 file - promoters50/2113842
aatgtcaa

SEQ ID NO: 180340 - DNA, 10 bp, Unknown
  misc_feature (1)..( 10): Result.005 file - promoters50/2113842
aaaataataa

SEQ ID NO: 180341 - DNA, 10 bp, Unknown
  misc_feature (1)..( 10): Result.005 file - promoters50/2113842
aaaataatat

SEQ ID NO: 180342 - DNA, 10 bp, Unknown
  misc_feature (1)..( 10): Result.005 file - promoters50/2113842
cctatattaa

SEQ ID NO: 180343 - DNA, 10 bp, Unknown
  misc_feature (1)..( 10): Result.005 file - promoters50/2113842
aacataatat

SEQ ID NO: 180344 - DNA, 12 bp, Unknown
  misc_feature (1)..( 12): Result.005 file - promoters50/2113842
tattatttaaga

SEQ ID NO: 180345 - DNA, 12 bp, Unknown
  misc_feature (1)..( 12): Result.005 file - promoters50/2113842
atatatataaag

SEQ ID NO: 180346 - DNA, 12 bp, Unknown
  misc_feature (1)..( 12): Result.005 file - promoters50/2113842
atatatataaca

SEQ ID NO: 180347 - DNA, 12 bp, Unknown
  misc_feature (1)..( 12): Result.005 file - promoters50/2113842
cactatatatat

SEQ ID NO: 180348 - DNA, 12 bp, Unknown
  misc_feature (1)..( 12): Result.005 file - promoters50/2113842
atatctataaag

SEQ ID NO: 180349 - DNA, 11 bp, Unknown
  misc_feature (1)..( 11): Result.005 file - promoters50/2113846
gttataattta

SEQ ID NO: 180350 - DNA, 11 bp, Unknown
  misc_feature (1)..( 11): Result.005 file - promoters50/2113846
actatcatttt

SEQ ID NO: 180351 - DNA, 11 bp, Unknown
  misc_feature (1)..( 11): Result.005 file - promoters50/2113846
agtatgattaa

SEQ ID NO: 180352 - DNA, 11 bp, Unknown
  misc_feature (1)..( 11): Result.005 file - promoters50/2113846
gttagaattac

SEQ ID NO: 180353 - DNA, 7 bp, Unknown
  misc_feature (1)..( 7): Result.005 file - promoters50/2113846
ccatttt

SEQ ID NO: 180354 - DNA, 9 bp, Unknown
  misc_feature (1)..( 9): Result.005 file - promoters50/2113846
aatttaacg

SEQ ID NO: 180355 - DNA, 9 bp, Unknown
  misc_feature (1)..( 9): Result.005 file - promoters50/2113846
tttttgacg

SEQ ID NO: 180356 - DNA, 9 bp, Unknown
  misc_feature (1)..( 9): Result.005 file - promoters50/2113846
aatttaatg

SEQ ID NO: 180357 - DNA, 9 bp, Unknown
  misc_feature (1)..( 9): Result.005 file - promoters50/2113846
tatttaaaa

SEQ ID NO: 180358 - DNA, 11 bp, Unknown
  misc_feature (1)..( 11): Result.005 file - promoters50/2113846
caaatttattt

SEQ ID NO: 180359 - DNA, 11 bp, Unknown
  misc_feature (1)..( 11): Result.005 file - promoters50/2113846
aaaaattagat

SEQ ID NO: 180360 - DNA, 11 bp, Unknown
  misc_feature (1)..( 11): Result.005 file - promoters50/2113846
tgtatttattt

SEQ ID NO: 180361 - DNA, 11 bp, Unknown
  misc_feature (1)..( 11): Result.005 file - promoters50/2113846
taaaagaatca

SEQ ID NO: 180362 - DNA, 8 bp, Unknown
  misc_feature (1)..( 8): Result.005 file - promoters50/2113846
attagatc

SEQ ID NO: 180363 - DNA, 8 bp, Unknown
  misc_feature (1)..( 8): Result.005 file - promoters50/2113846
cttatatc

SEQ ID NO: 180364 - DNA, 8 bp, Unknown
  misc_feature (1)..( 8): Result.005 file - promoters50/2113846
attagaaa

SEQ ID NO: 180365 - DNA, 8 bp, Unknown
  misc_feature (1)..( 8): Result.005 file - promoters50/2113846
attatatc

SEQ ID NO: 180366 - DNA, 11 bp, Unknown
  misc_feature (1)..( 11): Result.005 file - promoters50/2113889
cttgttaacat

SEQ ID NO: 180367 - DNA, 11 bp, Unknown
  misc_feature (1)..( 11): Result.005 file - promoters50/2113889
tatgtaaactg

SEQ ID NO: 180368 - DNA, 11 bp, Unknown
  misc_feature (1)..( 11): Result.005 file - promoters50/2113889
tatttaatttg

SEQ ID NO: 180369 - DNA, 11 bp, Unknown
  misc_feature (1)..( 11): Result.005 file - promoters50/2113889
aaaataatctg

SEQ ID NO: 180370 - DNA, 11 bp, Unknown
  misc_feature (1)..( 11): Result.005 file - promoters50/2113889
attttaatgat

SEQ ID NO: 180371 - DNA, 11 bp, Unknown
  misc_feature (1)..( 11): Result.005 file - promoters50/2113889
gatataatctc

SEQ ID NO: 180372 - DNA, 12 bp, Unknown
  misc_feature (1)..( 12): Result.005 file - promoters50/2113889
gttgactggttc

SEQ ID NO: 180373 - DNA, 12 bp, Unknown
  misc_feature (1)..( 12): Result.005 file - promoters50/2113889
gttaactttgta

SEQ ID NO: 180374 - DNA, 12 bp, Unknown
  misc_feature (1)..( 12): Result.005 file - promoters50/2113889
attaaccttgag

SEQ ID NO: 180375 - DNA, 12 bp, Unknown
  misc_feature (1)..( 12): Result.005 file - promoters50/2113889
attaattttctt

SEQ ID NO: 180376 - DNA, 12 bp, Unknown
  misc_feature (1)..( 12): Result.005 file - promoters50/2113889
aagaactttaat

SEQ ID NO: 180377 - DNA, 12 bp, Unknown
  misc_feature (1)..( 12): Result.005 file - promoters50/2113889
gttagtttttat

SEQ ID NO: 180378 - DNA, 15 bp, Unknown
  misc_feature (1)..( 15): Result.005 file - promoters50/2113889
agagcatttaaaaat

SEQ ID NO: 180379 - DNA, 15 bp, Unknown
  misc_feature (1)..( 15): Result.005 file - promoters50/2113889
tctatatttcaaaat

SEQ ID NO: 180380 - DNA, 15 bp, Unknown
  misc_feature (1)..( 15): Result.005 file - promoters50/2113889
gataaattttgagta

SEQ ID NO: 180381 - DNA, 15 bp, Unknown
  misc_feature (1)..( 15): Result.005 file - promoters50/2113889
gataaattacttgca

SEQ ID NO: 180382 - DNA, 15 bp, Unknown
  misc_feature (1)..( 15): Result.005 file - promoters50/2113889
tatatattctgatct

SEQ ID NO: 180383 - DNA, 15 bp, Unknown
  misc_feature (1)..( 15): Result.005 file - promoters50/2113889
cttgaattacaaaac

SEQ ID NO: 180384 - DNA, 16 bp, Unknown
  misc_feature (1)..( 16): Result.005 file - promoters50/2113889
ctaatatatataaggc

SEQ ID NO: 180385 - DNA, 10 bp, Unknown
  misc_feature (1)..( 10): Result.005 file - promoters50/2113889
tttaattaga

SEQ ID NO: 180386 - DNA, 10 bp, Unknown
  misc_feature (1)..( 10): Result.005 file - promoters50/2113889
aataattaaa

SEQ ID NO: 180387 - DNA, 10 bp, Unknown
  misc_feature (1)..( 10): Result.005 file - promoters50/2113889
tttaactagt

SEQ ID NO: 180388 - DNA, 10 bp, Unknown
  misc_feature (1)..( 10): Result.005 file - promoters50/2113889
gttacctagc

SEQ ID NO: 180389 - DNA, 10 bp, Unknown
  misc_feature (1)..( 10): Result.005 file - promoters50/2113889
tttatctaat

SEQ ID NO: 180390 - DNA, 10 bp, Unknown
  misc_feature (1)..( 10): Result.005 file - promoters50/2113889
aataaataaa

SEQ ID NO: 180391 - DNA, 14 bp, Unknown
  misc_feature (1)..( 14): Result.005 file - promoters50/2113889
aacgtgtttaaatt

SEQ ID NO: 180392 - DNA, 14 bp, Unknown
  misc_feature (1)..( 14): Result.005 file - promoters50/2113889
agagaattttaatg

SEQ ID NO: 180393 - DNA, 14 bp, Unknown
  misc_feature (1)..( 14): Result.005 file - promoters50/2113889
caatcaaattaatg

SEQ ID NO: 180394 - DNA, 14 bp, Unknown
  misc_feature (1)..( 14): Result.005 file - promoters50/2113889
atggaatattacta

SEQ ID NO: 180395 - DNA, 14 bp, Unknown
  misc_feature (1)..( 14): Result.005 file - promoters50/2113889
aatcaaaaataata

SEQ ID NO: 180396 - DNA, 14 bp, Unknown
  misc_feature (1)..( 14): Result.005 file - promoters50/2113889
aaagaataaaaaaa

SEQ ID NO: 180397 - DNA, 9 bp, Unknown
  misc_feature (1)..( 9): Result.005 file - promoters50/2113889
aaaaacaaa

SEQ ID NO: 180398 - DNA, 9 bp, Unknown
  misc_feature (1)..( 9): Result.005 file - promoters50/2113889
taaagcaaa

SEQ ID NO: 180399 - DNA, 9 bp, Unknown
  misc_feature (1)..( 9): Result.005 file - promoters50/2113889
gaaagaaaa

SEQ ID NO: 180400 - DNA, 9 bp, Unknown
  misc_feature (1)..( 9): Result.005 file - promoters50/2113889
aaaaccaaa

SEQ ID NO: 180401 - DNA, 9 bp, Unknown
  misc_feature (1)..( 9): Result.005 file - promoters50/2113889
aaaatcaac

SEQ ID NO: 180402 - DNA, 10 bp, Unknown
  misc_feature (1)..( 10): Result.005 file - promoters50/2113889
taaagtcaca

SEQ ID NO: 180403 - DNA, 14 bp, Unknown
  misc_feature (1)..( 14): Result.005 file - promoters50/2113889
agacaaattgatct

SEQ ID NO: 180404 - DNA, 14 bp, Unknown
  misc_feature (1)..( 14): Result.005 file - promoters50/2113889
ttcaaaatttatcc

SEQ ID NO: 180405 - DNA, 14 bp, Unknown
  misc_feature (1)..( 14): Result.005 file - promoters50/2113889
agataaattacttg

SEQ ID NO: 180406 - DNA, 14 bp, Unknown
  misc_feature (1)..( 14): Result.005 file - promoters50/2113889
atatattctgatct

SEQ ID NO: 180407 - DNA, 14 bp, Unknown
  misc_feature (1)..( 14): Result.005 file - promoters50/2113889
tgataaattttgag

SEQ ID NO: 180408 - DNA, 14 bp, Unknown
  misc_feature (1)..( 14): Result.005 file - promoters50/2113889
tacaaaactacata

SEQ ID NO: 180409 - DNA, 14 bp, Unknown
  misc_feature (1)..( 14): Result.005 file - promoters50/2113889
aatctaatatatat

SEQ ID NO: 180410 - DNA, 12 bp, Unknown
  misc_feature (1)..( 12): Result.005 file - promoters50/2113889
gataaattttga

SEQ ID NO: 180411 - DNA, 12 bp, Unknown
  misc_feature (1)..( 12): Result.005 file - promoters50/2113889
tacatattctga

SEQ ID NO: 180412 - DNA, 12 bp, Unknown
  misc_feature (1)..( 12): Result.005 file - promoters50/2113889
tcaaaatttatc

SEQ ID NO: 180413 - DNA, 12 bp, Unknown
  misc_feature (1)..( 12): Result.005 file - promoters50/2113889
tatatattctga

SEQ ID NO: 180414 - DNA, 12 bp, Unknown
  misc_feature (1)..( 12): Result.005 file - promoters50/2113889
aatatatataag

SEQ ID NO: 180415 - DNA, 12 bp, Unknown
  misc_feature (1)..( 12): Result.005 file - promoters50/2113889
aatagataaatt

SEQ ID NO: 180416 - DNA, 10 bp, Unknown
  misc_feature (1)..( 10): Result.005 file - promoters50/2113889
aaataataaa

SEQ ID NO: 180417 - DNA, 10 bp, Unknown
  misc_feature (1)..( 10): Result.005 file - promoters50/2113889
aaatattaac

SEQ ID NO: 180418 - DNA, 10 bp, Unknown
  misc_feature (1)..( 10): Result.005 file - promoters50/2113889
gcttaataaa

SEQ ID NO: 180419 - DNA, 10 bp, Unknown
  misc_feature (1)..( 10): Result.005 file - promoters50/2113889
ttctaataac

SEQ ID NO: 180420 - DNA, 10 bp, Unknown
  misc_feature (1)..( 10): Result.005 file - promoters50/2113889
aaagattaca

SEQ ID NO: 180421 - DNA, 10 bp, Unknown
  misc_feature (1)..( 10): Result.005 file - promoters50/2113889
gattattaac

SEQ ID NO: 180422 - DNA, 9 bp, Unknown
  misc_feature (1)..( 9): Result.005 file - promoters50/2113914
taatttaat

SEQ ID NO: 180423 - DNA, 9 bp, Unknown
  misc_feature (1)..( 9): Result.005 file - promoters50/2113914
taagttata

SEQ ID NO: 180424 - DNA, 9 bp, Unknown
  misc_feature (1)..( 9): Result.005 file - promoters50/2113914
ccatttaat

SEQ ID NO: 180425 - DNA, 8 bp, Unknown
  misc_feature (1)..( 8): Result.005 file - promoters50/2113914
aaacaaaa

SEQ ID NO: 180426 - DNA, 8 bp, Unknown
  misc_feature (1)..( 8): Result.005 file - promoters50/2113914
aaataaaa

SEQ ID NO: 180427 - DNA, 8 bp, Unknown
  misc_feature (1)..( 8): Result.005 file - promoters50/2113914
aaagaaac

SEQ ID NO: 180428 - DNA, 18 bp, Unknown
  misc_feature (1)..( 18): Result.005 file - promoters50/2113928
caaagttaaaacaagaga

SEQ ID NO: 180429 - DNA, 18 bp, Unknown
  misc_feature (1)..( 18): Result.005 file - promoters50/2113928
aaaaattattaaagtata

SEQ ID NO: 180430 - DNA, 19 bp, Unknown
  misc_feature (1)..( 19): Result.005 file - promoters50/2113928
taaagattattaaattata

SEQ ID NO: 180431 - DNA, 19 bp, Unknown
  misc_feature (1)..( 19): Result.005 file - promoters50/2113928
aaataatttatttacttat

SEQ ID NO: 180432 - DNA, 9 bp, Unknown
  misc_feature (1)..( 9): Result.005 file - promoters50/2113928
aatacaaat

SEQ ID NO: 180433 - DNA, 9 bp, Unknown
  misc_feature (1)..( 9): Result.005 file - promoters50/2113928
ctaacaaat

SEQ ID NO: 180434 - DNA, 9 bp, Unknown
  misc_feature (1)..( 9): Result.005 file - promoters50/2113928
aattcaaaa

SEQ ID NO: 180435 - DNA, 9 bp, Unknown
  misc_feature (1)..( 9): Result.005 file - promoters50/2113928
gtaagaaaa

SEQ ID NO: 180436 - DNA, 10 bp, Unknown
  misc_feature (1)..( 10): Result.005 file - promoters50/2113928
ctataaatag

SEQ ID NO: 180437 - DNA, 10 bp, Unknown
  misc_feature (1)..( 10): Result.005 file - promoters50/2113928
ctatatatat

SEQ ID NO: 180438 - DNA, 10 bp, Unknown
  misc_feature (1)..( 10): Result.005 file - promoters50/2113928
ctataagaac

SEQ ID NO: 180439 - DNA, 10 bp, Unknown
  misc_feature (1)..( 10): Result.005 file - promoters50/2113928
ttatttatat

SEQ ID NO: 180440 - DNA, 19 bp, Unknown
  misc_feature (1)..( 19): Result.005 file - promoters50/2113928
gatcaaagttaaaacaaga

SEQ ID NO: 180441 - DNA, 19 bp, Unknown
  misc_feature (1)..( 19): Result.005 file - promoters50/2113928
ttattaaattataacacac

SEQ ID NO: 180442 - DNA, 19 bp, Unknown
  misc_feature (1)..( 19): Result.005 file - promoters50/2113928
aaaaattattaaagtatat

SEQ ID NO: 180443 - DNA, 8 bp, Unknown
  misc_feature (1)..( 8): Result.005 file - promoters50/2113928
aaataatt

SEQ ID NO: 180444 - DNA, 13 bp, Unknown
  misc_feature (1)..( 13): Result.005 file - promoters50/2113928
tactcacaacttt

SEQ ID NO: 180445 - DNA, 13 bp, Unknown
  misc_feature (1)..( 13): Result.005 file - promoters50/2113928
accacttaacttt

SEQ ID NO: 180446 - DNA, 13 bp, Unknown
  misc_feature (1)..( 13): Result.005 file - promoters50/2113928
cctaatcaagttt

SEQ ID NO: 180447 - DNA, 13 bp, Unknown
  misc_feature (1)..( 13): Result.005 file - promoters50/2113928
taattttaatttt

SEQ ID NO: 180448 - DNA, 13 bp, Unknown
  misc_feature (1)..( 13): Result.005 file - promoters50/2113928
taattttaatttt

SEQ ID NO: 180449 - DNA, 8 bp, Unknown
  misc_feature (1)..( 8): Result.005 file - promoters50/2113928
taatttta

SEQ ID NO: 180450 - DNA, 8 bp, Unknown
  misc_feature (1)..( 8): Result.005 file - promoters50/2113928
taatttta

SEQ ID NO: 180451 - DNA, 8 bp, Unknown
  misc_feature (1)..( 8): Result.005 file - promoters50/2113928
taagtttc

SEQ ID NO: 180452 - DNA, 8 bp, Unknown
  misc_feature (1)..( 8): Result.005 file - promoters50/2113928
caagtttc

SEQ ID NO: 180453 - DNA, 12 bp, Unknown
  misc_feature (1)..( 12): Result.005 file - promoters50/2113928
atggtaaacata

SEQ ID NO: 180454 - DNA, 12 bp, Unknown
  misc_feature (1)..( 12): Result.005 file - promoters50/2113928
aaaaaaaacatt

SEQ ID NO: 180455 - DNA, 12 bp, Unknown
  misc_feature (1)..( 12): Result.005 file - promoters50/2113928
tactgtaacatt

SEQ ID NO: 180456 - DNA, 12 bp, Unknown
  misc_feature (1)..( 12): Result.005 file - promoters50/2113928
aaaaagaacaat

SEQ ID NO: 180457 - DNA, 10 bp, Unknown
  misc_feature (1)..( 10): Result.005 file - promoters50/2113967
ttattttata

SEQ ID NO: 180458 - DNA, 10 bp, Unknown
  misc_feature (1)..( 10): Result.005 file - promoters50/2113967
ctatattata

SEQ ID NO: 180459 - DNA, 10 bp, Unknown
  misc_feature (1)..( 10): Result.005 file - promoters50/2113967
agattttata

SEQ ID NO: 180460 - DNA, 10 bp, Unknown
  misc_feature (1)..( 10): Result.005 file - promoters50/2113967
ttattatatt

SEQ ID NO: 180461 - DNA, 10 bp, Unknown
  misc_feature (1)..( 10): Result.005 file - promoters50/2113967
ggatattaca

SEQ ID NO: 180462 - DNA, 10 bp, Unknown
  misc_feature (1)..( 10): Result.005 file - promoters50/2113967
ttattttact

SEQ ID NO: 180463 - DNA, 15 bp, Unknown
  misc_feature (1)..( 15): Result.005 file - promoters50/2113967
aaaaattattttaat

SEQ ID NO: 180464 - DNA, 15 bp, Unknown
  misc_feature (1)..( 15): Result.005 file - promoters50/2113967
acaacttattttatg

SEQ ID NO: 180465 - DNA, 15 bp, Unknown
  misc_feature (1)..( 15): Result.005 file - promoters50/2113967
tttcaatattgggcc

SEQ ID NO: 180466 - DNA, 15 bp, Unknown
  misc_feature (1)..( 15): Result.005 file - promoters50/2113967
attatctattttgtc

SEQ ID NO: 180467 - DNA, 15 bp, Unknown
  misc_feature (1)..( 15): Result.005 file - promoters50/2113967
gcatgttatattaaa

SEQ ID NO: 180468 - DNA, 15 bp, Unknown
  misc_feature (1)..( 15): Result.005 file - promoters50/2113967
gttcaatgttcatca

SEQ ID NO: 180469 - DNA, 15 bp, Unknown
  misc_feature (1)..( 15): Result.005 file - promoters50/2113967
tgcccagttttgaat

SEQ ID NO: 180470 - DNA, 12 bp, Unknown
  misc_feature (1)..( 12): Result.005 file - promoters50/2114005
aaaatttatata

SEQ ID NO: 180471 - DNA, 12 bp, Unknown
  misc_feature (1)..( 12): Result.005 file - promoters50/2114005
aaagttttgtgg

SEQ ID NO: 180472 - DNA, 13 bp, Unknown
  misc_feature (1)..( 13): Result.005 file - promoters50/2114005
aaatattgtatgc

SEQ ID NO: 180473 - DNA, 13 bp, Unknown
  misc_feature (1)..( 13): Result.005 file - promoters50/2114005
ttcaatttttata

SEQ ID NO: 180474 - DNA, 13 bp, Unknown
  misc_feature (1)..( 13): Result.005 file - promoters50/2114005
tcggatttttagt

SEQ ID NO: 180475 - DNA, 11 bp, Unknown
  misc_feature (1)..( 11): Result.005 file - promoters50/2114005
aatttatatat

SEQ ID NO: 180476 - DNA, 11 bp, Unknown
  misc_feature (1)..( 11): Result.005 file - promoters50/2114005
aggttatgtat

SEQ ID NO: 180477 - DNA, 11 bp, Unknown
  misc_feature (1)..( 11): Result.005 file - promoters50/2114005
tatttaaatat

SEQ ID NO: 180478 - DNA, 11 bp, Unknown
  misc_feature (1)..( 11): Result.005 file - promoters50/2114005
aatttttatag

SEQ ID NO: 180479 - DNA, 11 bp, Unknown
  misc_feature (1)..( 11): Result.005 file - promoters50/2114005
taattatgtta

SEQ ID NO: 180480 - DNA, 11 bp, Unknown
  misc_feature (1)..( 11): Result.005 file - promoters50/2114005
gatttttagta

SEQ ID NO: 180481 - DNA, 11 bp, Unknown
  misc_feature (1)..( 11): Result.005 file - promoters50/2114005
attttcctttg

SEQ ID NO: 180482 - DNA, 11 bp, Unknown
  misc_feature (1)..( 11): Result.005 file - promoters50/2114005
acttttcttag

SEQ ID NO: 180483 - DNA, 11 bp, Unknown
  misc_feature (1)..( 11): Result.005 file - promoters50/2114005
ggttttgttat

SEQ ID NO: 180484 - DNA, 11 bp, Unknown
  misc_feature (1)..( 11): Result.005 file - promoters50/2114005
aattatgttat

SEQ ID NO: 180485 - DNA, 11 bp, Unknown
  misc_feature (1)..( 11): Result.005 file - promoters50/2114005
tattttaggtg

SEQ ID NO: 180486 - DNA, 11 bp, Unknown
  misc_feature (1)..( 11): Result.005 file - promoters50/2114005
aataattttcc

SEQ ID NO: 180487 - DNA, 11 bp, Unknown
  misc_feature (1)..( 11): Result.005 file - promoters50/2114005
ataaattttaa

SEQ ID NO: 180488 - DNA, 11 bp, Unknown
  misc_feature (1)..( 11): Result.005 file - promoters50/2114005
ttcaattttta

SEQ ID NO: 180489 - DNA, 11 bp, Unknown
  misc_feature (1)..( 11): Result.005 file - promoters50/2114005
tcggattttta

SEQ ID NO: 180490 - DNA, 11 bp, Unknown
  misc_feature (1)..( 11): Result.005 file - promoters50/2114005
atacatttcga

SEQ ID NO: 180491 - DNA, 12 bp, Unknown
  misc_feature (1)..( 12): Result.005 file - promoters50/2114026
gaagttttcgaa

SEQ ID NO: 180492 - DNA, 12 bp, Unknown
  misc_feature (1)..( 12): Result.005 file - promoters50/2114026
caagttttgatc

SEQ ID NO: 180493 - DNA, 12 bp, Unknown
  misc_feature (1)..( 12): Result.005 file - promoters50/2114026
gaatttttttaa

SEQ ID NO: 180494 - DNA, 12 bp, Unknown
  misc_feature (1)..( 12): Result.005 file - promoters50/2114026
taagtttttcgt

SEQ ID NO: 180495 - DNA, 12 bp, Unknown
  misc_feature (1)..( 12): Result.005 file - promoters50/2114026
tgagtattgatc

SEQ ID NO: 180496 - DNA, 12 bp, Unknown
  misc_feature (1)..( 12): Result.005 file - promoters50/2114026
tcggaattgatt

SEQ ID NO: 180497 - DNA, 12 bp, Unknown
  misc_feature (1)..( 12): Result.005 file - promoters50/2114026
ctattctttatt

SEQ ID NO: 180498 - DNA, 12 bp, Unknown
  misc_feature (1)..( 12): Result.005 file - promoters50/2114026
taatttttataa

SEQ ID NO: 180499 - DNA, 18 bp, Unknown
  misc_feature (1)..( 18): Result.005 file - promoters50/2114026
accaagttttattgtagt

SEQ ID NO: 180500 - DNA, 18 bp, Unknown
  misc_feature (1)..( 18): Result.005 file - promoters50/2114026
tagcattttcatttcttg

SEQ ID NO: 180501 - DNA, 18 bp, Unknown
  misc_feature (1)..( 18): Result.005 file - promoters50/2114026
tgtttttttcattgtagt

SEQ ID NO: 180502 - DNA, 18 bp, Unknown
  misc_feature (1)..( 18): Result.005 file - promoters50/2114026
taagagttttacgttttg

SEQ ID NO: 180503 - DNA, 18 bp, Unknown
  misc_feature (1)..( 18): Result.005 file - promoters50/2114026
taatagtttctttttgca

SEQ ID NO: 180504 - DNA, 19 bp, Unknown
  misc_feature (1)..( 19): Result.005 file - promoters50/2114026
tttggtttctcattaattg

SEQ ID NO: 180505 - DNA, 12 bp, Unknown
  misc_feature (1)..( 12): Result.005 file - promoters50/2114026
gtataagtaaac

SEQ ID NO: 180506 - DNA, 12 bp, Unknown
  misc_feature (1)..( 12): Result.005 file - promoters50/2114026
ttttaattaatt

SEQ ID NO: 180507 - DNA, 12 bp, Unknown
  misc_feature (1)..( 12): Result.005 file - promoters50/2114026
aataaagaaaac

SEQ ID NO: 180508 - DNA, 12 bp, Unknown
  misc_feature (1)..( 12): Result.005 file - promoters50/2114026
ttatgagttatg

SEQ ID NO: 180509 - DNA, 12 bp, Unknown
  misc_feature (1)..( 12): Result.005 file - promoters50/2114026
tatcaaataaaa

SEQ ID NO: 180510 - DNA, 12 bp, Unknown
  misc_feature (1)..( 12): Result.005 file - promoters50/2114026
tattaacatgac

SEQ ID NO: 180511 - DNA, 12 bp, Unknown
  misc_feature (1)..( 12): Result.005 file - promoters50/2114026
ttatgactccta

SEQ ID NO: 180512 - DNA, 10 bp, Unknown
  misc_feature (1)..( 10): Result.005 file - promoters50/2114026
gtatatatac

SEQ ID NO: 180513 - DNA, 10 bp, Unknown
  misc_feature (1)..( 10): Result.005 file - promoters50/2114026
ctatataatg

SEQ ID NO: 180514 - DNA, 10 bp, Unknown
  misc_feature (1)..( 10): Result.005 file - promoters50/2114026
ctatataata

SEQ ID NO: 180515 - DNA, 10 bp, Unknown
  misc_feature (1)..( 10): Result.005 file - promoters50/2114026
ctatatatac

SEQ ID NO: 180516 - DNA, 10 bp, Unknown
  misc_feature (1)..( 10): Result.005 file - promoters50/2114026
atatatatcc

SEQ ID NO: 180517 - DNA, 10 bp, Unknown
  misc_feature (1)..( 10): Result.005 file - promoters50/2114026
ctatataaag

SEQ ID NO: 180518 - DNA, 10 bp, Unknown
  misc_feature (1)..( 10): Result.005 file - promoters50/2114026
taatataaaa

SEQ ID NO: 180519 - DNA, 18 bp, Unknown
  misc_feature (1)..( 18): Result.005 file - promoters50/2114030
ttttacatctataaataa

SEQ ID NO: 180520 - DNA, 18 bp, Unknown
  misc_feature (1)..( 18): Result.005 file - promoters50/2114030
ccatacctttataaactc

SEQ ID NO: 180521 - DNA, 18 bp, Unknown
  misc_feature (1)..( 18): Result.005 file - promoters50/2114030
atcgtccaatataaatag

SEQ ID NO: 180522 - DNA, 18 bp, Unknown
  misc_feature (1)..( 18): Result.005 file - promoters50/2114030
ctcttcctttatatataa

SEQ ID NO: 180523 - DNA, 18 bp, Unknown
  misc_feature (1)..( 18): Result.005 file - promoters50/2114030
ttttacatgtatatatac

SEQ ID NO: 180524 - DNA, 18 bp, Unknown
  misc_feature (1)..( 18): Result.005 file - promoters50/2114030
attctcttgtatatatac

SEQ ID NO: 180525 - DNA, 16 bp, Unknown
  misc_feature (1)..( 16): Result.005 file - promoters50/2114030
aattgaaaatacaaat

SEQ ID NO: 180526 - DNA, 16 bp, Unknown
  misc_feature (1)..( 16): Result.005 file - promoters50/2114030
cattcaaagaatgttg

SEQ ID NO: 180527 - DNA, 16 bp, Unknown
  misc_feature (1)..( 16): Result.005 file - promoters50/2114030
catacaatgtaatgaa

SEQ ID NO: 180528 - DNA, 16 bp, Unknown
  misc_feature (1)..( 16): Result.005 file - promoters50/2114030
atatcaaacaataaaa

SEQ ID NO: 180529 - DNA, 16 bp, Unknown
  misc_feature (1)..( 16): Result.005 file - promoters50/2114030
attataaaaaatttac

SEQ ID NO: 180530 - DNA, 16 bp, Unknown
  misc_feature (1)..( 16): Result.005 file - promoters50/2114030
accttaaaaaatcaaa

SEQ ID NO: 180531 - DNA, 9 bp, Unknown
  misc_feature (1)..( 9): Result.005 file - promoters50/2114030
tataaaatt

SEQ ID NO: 180532 - DNA, 9 bp, Unknown
  misc_feature (1)..( 9): Result.005 file - promoters50/2114030
catacaatg

SEQ ID NO: 180533 - DNA, 9 bp, Unknown
  misc_feature (1)..( 9): Result.005 file - promoters50/2114030
ttaaaaatt

SEQ ID NO: 180534 - DNA, 9 bp, Unknown
  misc_feature (1)..( 9): Result.005 file - promoters50/2114030
accaaaatt

SEQ ID NO: 180535 - DNA, 9 bp, Unknown
  misc_feature (1)..( 9): Result.005 file - promoters50/2114030
cattcaaag

SEQ ID NO: 180536 - DNA, 9 bp, Unknown
  misc_feature (1)..( 9): Result.005 file - promoters50/2114030
actaaaaat

SEQ ID NO: 180537 - DNA, 14 bp, Unknown
  misc_feature (1)..( 14): Result.005 file - promoters50/2114095
ctaaaaaaatcttt

SEQ ID NO: 180538 - DNA, 14 bp, Unknown
  misc_feature (1)..( 14): Result.005 file - promoters50/2114095
agaagaaactctct

SEQ ID NO: 180539 - DNA, 14 bp, Unknown
  misc_feature (1)..( 14): Result.005 file - promoters50/2114095
catcatcaatcttt

SEQ ID NO: 180540 - DNA, 14 bp, Unknown
  misc_feature (1)..( 14): Result.005 file - promoters50/2114095
attctaaaatcttc

SEQ ID NO: 180541 - DNA, 14 bp, Unknown
  misc_feature (1)..( 14): Result.005 file - promoters50/2114095
ctataaaaatgcac

SEQ ID NO: 180542 - DNA, 14 bp, Unknown
  misc_feature (1)..( 14): Result.005 file - promoters50/2114095
tcttaaaaacctta

SEQ ID NO: 180543 - DNA, 14 bp, Unknown
  misc_feature (1)..( 14): Result.005 file - promoters50/2114095
acttgtgaaccttc

SEQ ID NO: 180544 - DNA, 12 bp, Unknown
  misc_feature (1)..( 12): Result.005 file - promoters50/2114111
atcaatcatttt

SEQ ID NO: 180545 - DNA, 12 bp, Unknown
  misc_feature (1)..( 12): Result.005 file - promoters50/2114111
tgaaataatttc

SEQ ID NO: 180546 - DNA, 12 bp, Unknown
  misc_feature (1)..( 12): Result.005 file - promoters50/2114111
atcaatgatttg

SEQ ID NO: 180547 - DNA, 12 bp, Unknown
  misc_feature (1)..( 12): Result.005 file - promoters50/2114111
gaacttgaattg

SEQ ID NO: 180548 - DNA, 9 bp, Unknown
  misc_feature (1)..( 9): Result.005 file - promoters50/2114111
aattttggt

SEQ ID NO: 180549 - DNA, 9 bp, Unknown
  misc_feature (1)..( 9): Result.005 file - promoters50/2114111
aattttcga

SEQ ID NO: 180550 - DNA, 9 bp, Unknown
  misc_feature (1)..( 9): Result.005 file - promoters50/2114111
aatttgcga

SEQ ID NO: 180551 - DNA, 7 bp, Unknown
  misc_feature (1)..( 7): Result.005 file - promoters50/2114111
taatatt

SEQ ID NO: 180552 - DNA, 7 bp, Unknown
  misc_feature (1)..( 7): Result.005 file - promoters50/2114111
taaaatt

SEQ ID NO: 180553 - DNA, 7 bp, Unknown
  misc_feature (1)..( 7): Result.005 file - promoters50/2114111
taatatt

SEQ ID NO: 180554 - DNA, 7 bp, Unknown
  misc_feature (1)..( 7): Result.005 file - promoters50/2114111
gaatatt

SEQ ID NO: 180555 - DNA, 8 bp, Unknown
  misc_feature (1)..( 8): Result.005 file - promoters50/2114111
taaagccc

SEQ ID NO: 180556 - DNA, 8 bp, Unknown
  misc_feature (1)..( 8): Result.005 file - promoters50/2114111
aaaagcct

SEQ ID NO: 180557 - DNA, 8 bp, Unknown
  misc_feature (1)..( 8): Result.005 file - promoters50/2114111
aaaaacct

SEQ ID NO: 180558 - DNA, 8 bp, Unknown
  misc_feature (1)..( 8): Result.005 file - promoters50/2114111
aaaaaccg

SEQ ID NO: 180559 - DNA, 8 bp, Unknown
  misc_feature (1)..( 8): Result.005 file - promoters50/2114111
aaaaacct

SEQ ID NO: 180560 - DNA, 8 bp, Unknown
  misc_feature (1)..( 8): Result.005 file - promoters50/2114111
aaaagcct

SEQ ID NO: 180561 - DNA, 10 bp, Unknown
  misc_feature (1)..( 10): Result.005 file - promoters50/2114111
taactgagaa

SEQ ID NO: 180562 - DNA, 10 bp, Unknown
  misc_feature (1)..( 10): Result.005 file - promoters50/2114111
caacttagaa

SEQ ID NO: 180563 - DNA, 10 bp, Unknown
  misc_feature (1)..( 10): Result.005 file - promoters50/2114111
caactttccc

SEQ ID NO: 180564 - DNA, 8 bp, Unknown
  misc_feature (1)..( 8): Result.005 file - promoters50/2114111
caaattat

SEQ ID NO: 180565 - DNA, 8 bp, Unknown
  misc_feature (1)..( 8): Result.005 file - promoters50/2114111
caatttat

SEQ ID NO: 180566 - DNA, 8 bp, Unknown
  misc_feature (1)..( 8): Result.005 file - promoters50/2114111
gaaattag

SEQ ID NO: 180567 - DNA, 12 bp, Unknown
  misc_feature (1)..( 12): Result.005 file - promoters50/2114111
tgaaatatttaa

SEQ ID NO: 180568 - DNA, 12 bp, Unknown
  misc_feature (1)..( 12): Result.005 file - promoters50/2114111
tgaaatagttaa

SEQ ID NO: 180569 - DNA, 12 bp, Unknown
  misc_feature (1)..( 12): Result.005 file - promoters50/2114111
gaaaatagaaga

SEQ ID NO: 180570 - DNA, 9 bp, Unknown
  misc_feature (1)..( 9): Result.005 file - promoters50/2114115
aaatctttt

SEQ ID NO: 180571 - DNA, 9 bp, Unknown
  misc_feature (1)..( 9): Result.005 file - promoters50/2114115
agatcattt

SEQ ID NO: 180572 - DNA, 9 bp, Unknown
  misc_feature (1)..( 9): Result.005 file - promoters50/2114115
aaatgttta

SEQ ID NO: 180573 - DNA, 9 bp, Unknown
  misc_feature (1)..( 9): Result.005 file - promoters50/2114115
tgatcatgc

SEQ ID NO: 180574 - DNA, 9 bp, Unknown
  misc_feature (1)..( 9): Result.005 file - promoters50/2114115
tgatcactc

SEQ ID NO: 180575 - DNA, 12 bp, Unknown
  misc_feature (1)..( 12): Result.005 file - promoters50/2114115
ggtcgatctatc

SEQ ID NO: 180576 - DNA, 12 bp, Unknown
  misc_feature (1)..( 12): Result.005 file - promoters50/2114115
ttatgatttatt

SEQ ID NO: 180577 - DNA, 12 bp, Unknown
  misc_feature (1)..( 12): Result.005 file - promoters50/2114115
aatggatatata

SEQ ID NO: 180578 - DNA, 12 bp, Unknown
  misc_feature (1)..( 12): Result.005 file - promoters50/2114115
ttatgatttctt

SEQ ID NO: 180579 - DNA, 12 bp, Unknown
  misc_feature (1)..( 12): Result.005 file - promoters50/2114115
ttcggattgctt

SEQ ID NO: 180580 - DNA, 7 bp, Unknown
  misc_feature (1)..( 7): Result.005 file - promoters50/2114119
ttttcta

SEQ ID NO: 180581 - DNA, 7 bp, Unknown
  misc_feature (1)..( 7): Result.005 file - promoters50/2114119
ttttctt

SEQ ID NO: 180582 - DNA, 8 bp, Unknown
  misc_feature (1)..( 8): Result.005 file - promoters50/2114119
tttgtctt

SEQ ID NO: 180583 - DNA, 14 bp, Unknown
  misc_feature (1)..( 14): Result.005 file - promoters50/2114138
taatagatttacgt

SEQ ID NO: 180584 - DNA, 14 bp, Unknown
  misc_feature (1)..( 14): Result.005 file - promoters50/2114138
taatggatctacac

SEQ ID NO: 180585 - DNA, 14 bp, Unknown
  misc_feature (1)..( 14): Result.005 file - promoters50/2114138
ttgatttttttcgt

SEQ ID NO: 180586 - DNA, 14 bp, Unknown
  misc_feature (1)..( 14): Result.005 file - promoters50/2114138
atcttgatgtacat

SEQ ID NO: 180587 - DNA, 14 bp, Unknown
  misc_feature (1)..( 14): Result.005 file - promoters50/2114138
aagtagattctagg

SEQ ID NO: 180588 - DNA, 14 bp, Unknown
  misc_feature (1)..( 14): Result.005 file - promoters50/2114138
caatggattcatat

SEQ ID NO: 180589 - DNA, 9 bp, Unknown
  misc_feature (1)..( 9): Result.005 file - promoters50/2114138
aatgttgga

SEQ ID NO: 180590 - DNA, 9 bp, Unknown
  misc_feature (1)..( 9): Result.005 file - promoters50/2114138
tctgttgga

SEQ ID NO: 180591 - DNA, 9 bp, Unknown
  misc_feature (1)..( 9): Result.005 file - promoters50/2114138
aattttgaa

SEQ ID NO: 180592 - DNA, 9 bp, Unknown
  misc_feature (1)..( 9): Result.005 file - promoters50/2114138
gtttttgaa

SEQ ID NO: 180593 - DNA, 9 bp, Unknown
  misc_feature (1)..( 9): Result.005 file - promoters50/2114138
gtttttgat

SEQ ID NO: 180594 - DNA, 9 bp, Unknown
  misc_feature (1)..( 9): Result.005 file - promoters50/2114138
cattttata

SEQ ID NO: 180595 - DNA, 9 bp, Unknown
  misc_feature (1)..( 9): Result.005 file - promoters50/2114138
tttttggga

SEQ ID NO: 180596 - DNA, 9 bp, Unknown
  misc_feature (1)..( 9): Result.005 file - promoters50/2114138
cttttggtt

SEQ ID NO: 180597 - DNA, 9 bp, Unknown
  misc_feature (1)..( 9): Result.005 file - promoters50/2114138
tttttgggg

SEQ ID NO: 180598 - DNA, 9 bp, Unknown
  misc_feature (1)..( 9): Result.005 file - promoters50/2114138
aatttggtt

SEQ ID NO: 180599 - DNA, 9 bp, Unknown
  misc_feature (1)..( 9): Result.005 file - promoters50/2114138
tttttgata

SEQ ID NO: 180600 - DNA, 9 bp, Unknown
  misc_feature (1)..( 9): Result.005 file - promoters50/2114138
gttttgaag

SEQ ID NO: 180601 - DNA, 7 bp, Unknown
  misc_feature (1)..( 7): Result.005 file - promoters50/2114141
atttata

SEQ ID NO: 180602 - DNA, 7 bp, Unknown
  misc_feature (1)..( 7): Result.005 file - promoters50/2114141
ttttata

SEQ ID NO: 180603 - DNA, 7 bp, Unknown
  misc_feature (1)..( 7): Result.005 file - promoters50/2114141
ttttatt

SEQ ID NO: 180604 - DNA, 9 bp, Unknown
  misc_feature (1)..( 9): Result.005 file - promoters50/2114141
aactttaat

SEQ ID NO: 180605 - DNA, 9 bp, Unknown
  misc_feature (1)..( 9): Result.005 file - promoters50/2114141
tactttatt

SEQ ID NO: 180606 - DNA, 9 bp, Unknown
  misc_feature (1)..( 9): Result.005 file - promoters50/2114141
aaccttaat

SEQ ID NO: 180607 - DNA, 9 bp, Unknown
  misc_feature (1)..( 9): Result.005 file - promoters50/2114141
aaaaagttt

SEQ ID NO: 180608 - DNA, 9 bp, Unknown
  misc_feature (1)..( 9): Result.005 file - promoters50/2114141
aaatagttt

SEQ ID NO: 180609 - DNA, 9 bp, Unknown
  misc_feature (1)..( 9): Result.005 file - promoters50/2114141
ttatagttc

SEQ ID NO: 180610 - DNA, 8 bp, Unknown
  misc_feature (1)..( 8): Result.005 file - promoters50/2114141
ttaagttt

SEQ ID NO: 180611 - DNA, 8 bp, Unknown
  misc_feature (1)..( 8): Result.005 file - promoters50/2114141
ttaatttt

SEQ ID NO: 180612 - DNA, 8 bp, Unknown
  misc_feature (1)..( 8): Result.005 file - promoters50/2114141
ttaattaa

SEQ ID NO: 180613 - DNA, 8 bp, Unknown
  misc_feature (1)..( 8): Result.005 file - promoters50/2114145
tatacaat

SEQ ID NO: 180614 - DNA, 8 bp, Unknown
  misc_feature (1)..( 8): Result.005 file - promoters50/2114145
aatacaaa

SEQ ID NO: 180615 - DNA, 8 bp, Unknown
  misc_feature (1)..( 8): Result.005 file - promoters50/2114145
aatacaaa

SEQ ID NO: 180616 - DNA, 8 bp, Unknown
  misc_feature (1)..( 8): Result.005 file - promoters50/2114145
tatacaaa

SEQ ID NO: 180617 - DNA, 8 bp, Unknown
  misc_feature (1)..( 8): Result.005 file - promoters50/2114145
tataaaat

SEQ ID NO: 180618 - DNA, 9 bp, Unknown
  misc_feature (1)..( 9): Result.005 file - promoters50/2114145
atgattcta

SEQ ID NO: 180619 - DNA, 9 bp, Unknown
  misc_feature (1)..( 9): Result.005 file - promoters50/2114145
tctattcta

SEQ ID NO: 180620 - DNA, 9 bp, Unknown
  misc_feature (1)..( 9): Result.005 file - promoters50/2114145
atgattctt

SEQ ID NO: 180621 - DNA, 9 bp, Unknown
  misc_feature (1)..( 9): Result.005 file - promoters50/2114145
gtgactctc

SEQ ID NO: 180622 - DNA, 9 bp, Unknown
  misc_feature (1)..( 9): Result.005 file - promoters50/2114145
atgattact

SEQ ID NO: 180623 - DNA, 8 bp, Unknown
  misc_feature (1)..( 8): Result.005 file - promoters50/2114145
aaaagaaa

SEQ ID NO: 180624 - DNA, 8 bp, Unknown
  misc_feature (1)..( 8): Result.005 file - promoters50/2114145
aaaataaa

SEQ ID NO: 180625 - DNA, 8 bp, Unknown
  misc_feature (1)..( 8): Result.005 file - promoters50/2114145
taattaac

SEQ ID NO: 180626 - DNA, 8 bp, Unknown
  misc_feature (1)..( 8): Result.005 file - promoters50/2114145
aaattaaa

SEQ ID NO: 180627 - DNA, 8 bp, Unknown
  misc_feature (1)..( 8): Result.005 file - promoters50/2114145
tcaataaa

SEQ ID NO: 180628 - DNA, 13 bp, Unknown
  misc_feature (1)..( 13): Result.005 file - promoters50/2114175
ttttattggtttt

SEQ ID NO: 180629 - DNA, 13 bp, Unknown
  misc_feature (1)..( 13): Result.005 file - promoters50/2114175
cattattgttttt

SEQ ID NO: 180630 - DNA, 13 bp, Unknown
  misc_feature (1)..( 13): Result.005 file - promoters50/2114175
gtttatgttggtc

SEQ ID NO: 180631 - DNA, 9 bp, Unknown
  misc_feature (1)..( 9): Result.005 file - promoters50/2114175
aaaaaaaaa

SEQ ID NO: 180632 - DNA, 9 bp, Unknown
  misc_feature (1)..( 9): Result.005 file - promoters50/2114175
aaataaaaa

SEQ ID NO: 180633 - DNA, 9 bp, Unknown
  misc_feature (1)..( 9): Result.005 file - promoters50/2114175
aaagatggg

SEQ ID NO: 180634 - DNA, 13 bp, Unknown
  misc_feature (1)..( 13): Result.005 file - promoters50/2114175
cattatgggacca

SEQ ID NO: 180635 - DNA, 13 bp, Unknown
  misc_feature (1)..( 13): Result.005 file - promoters50/2114175
cataatgggacca

SEQ ID NO: 180636 - DNA, 13 bp, Unknown
  misc_feature (1)..( 13): Result.005 file - promoters50/2114175
ttccatgggaaag

SEQ ID NO: 180637 - DNA, 10 bp, Unknown
  misc_feature (1)..( 10): Result.005 file - promoters50/2114178
taaaatatga

SEQ ID NO: 180638 - DNA, 10 bp, Unknown
  misc_feature (1)..( 10): Result.005 file - promoters50/2114178
aaaaatagat

SEQ ID NO: 180639 - DNA, 10 bp, Unknown
  misc_feature (1)..( 10): Result.005 file - promoters50/2114178
taaaagatga

SEQ ID NO: 180640 - DNA, 9 bp, Unknown
  misc_feature (1)..( 9): Result.005 file - promoters50/2114178
caatcaaaa

SEQ ID NO: 180641 - DNA, 9 bp, Unknown
  misc_feature (1)..( 9): Result.005 file - promoters50/2114178
gtttcaaaa

SEQ ID NO: 180642 - DNA, 9 bp, Unknown
  misc_feature (1)..( 9): Result.005 file - promoters50/2114178
gtttcaaac

SEQ ID NO: 180643 - DNA, 9 bp, Unknown
  misc_feature (1)..( 9): Result.005 file - promoters50/2114178
ttttcaaac

SEQ ID NO: 180644 - DNA, 9 bp, Unknown
  misc_feature (1)..( 9): Result.005 file - promoters50/2114178
tgatcaaaa

SEQ ID NO: 180645 - DNA, 9 bp, Unknown
  misc_feature (1)..( 9): Result.005 file - promoters50/2114178
gattcaaaa

SEQ ID NO: 180646 - DNA, 9 bp, Unknown
  misc_feature (1)..( 9): Result.005 file - promoters50/2114178
tgatcaaat

SEQ ID NO: 180647 - DNA, 9 bp, Unknown
  misc_feature (1)..( 9): Result.005 file - promoters50/2114178
ttttcaaat

SEQ ID NO: 180648 - DNA, 9 bp, Unknown
  misc_feature (1)..( 9): Result.005 file - promoters50/2114178
tgttttata

SEQ ID NO: 180649 - DNA, 9 bp, Unknown
  misc_feature (1)..( 9): Result.005 file - promoters50/2114178
tgtattatt

SEQ ID NO: 180650 - DNA, 9 bp, Unknown
  misc_feature (1)..( 9): Result.005 file - promoters50/2114178
ttttttttt

SEQ ID NO: 180651 - DNA, 9 bp, Unknown
  misc_feature (1)..( 9): Result.005 file - promoters50/2114178
caaattatt

SEQ ID NO: 180652 - DNA, 14 bp, Unknown
  misc_feature (1)..( 14): Result.005 file - promoters50/2114178
tatagtaaaacagc

SEQ ID NO: 180653 - DNA, 14 bp, Unknown
  misc_feature (1)..( 14): Result.005 file - promoters50/2114178
tatagcaaaactcc

SEQ ID NO: 180654 - DNA, 14 bp, Unknown
  misc_feature (1)..( 14): Result.005 file - promoters50/2114178
ttgagaaaaacatg

SEQ ID NO: 180655 - DNA, 14 bp, Unknown
  misc_feature (1)..( 14): Result.005 file - promoters50/2114178
aagtggaaaaatcc

SEQ ID NO: 180656 - DNA, 8 bp, Unknown
  misc_feature (1)..( 8): Result.005 file - promoters50/2114178
aaaataat

SEQ ID NO: 180657 - DNA, 8 bp, Unknown
  misc_feature (1)..( 8): Result.005 file - promoters50/2114178
aaattaag

SEQ ID NO: 180658 - DNA, 8 bp, Unknown
  misc_feature (1)..( 8): Result.005 file - promoters50/2114178
tcaataat

SEQ ID NO: 180659 - DNA, 10 bp, Unknown
  misc_feature (1)..( 10): Result.005 file - promoters50/2114178
agcaaagtca

SEQ ID NO: 180660 - DNA, 10 bp, Unknown
  misc_feature (1)..( 10): Result.005 file - promoters50/2114178
agcaaaggaa

SEQ ID NO: 180661 - DNA, 10 bp, Unknown
  misc_feature (1)..( 10): Result.005 file - promoters50/2114178
atcaaaggaa

SEQ ID NO: 180662 - DNA, 9 bp, Unknown
  misc_feature (1)..( 9): Result.005 file - promoters50/2114200
ttcatcttc

SEQ ID NO: 180663 - DNA, 9 bp, Unknown
  misc_feature (1)..( 9): Result.005 file - promoters50/2114200
ttcttcttc

SEQ ID NO: 180664 - DNA, 9 bp, Unknown
  misc_feature (1)..( 9): Result.005 file - promoters50/2114200
cgcatcttt

SEQ ID NO: 180665 - DNA, 9 bp, Unknown
  misc_feature (1)..( 9): Result.005 file - promoters50/2114200
gtcttcttt

SEQ ID NO: 180666 - DNA, 9 bp, Unknown
  misc_feature (1)..( 9): Result.005 file - promoters50/2114200
gccttattt

SEQ ID NO: 180667 - DNA, 10 bp, Unknown
  misc_feature (1)..( 10): Result.005 file - promoters50/2114200
aaaatccttg

SEQ ID NO: 180668 - DNA, 14 bp, Unknown
  misc_feature (1)..( 14): Result.005 file - promoters50/2169576
agagctaaaaacgg

SEQ ID NO: 180669 - DNA, 14 bp, Unknown
  misc_feature (1)..( 14): Result.005 file - promoters50/2169576
ttttctataaatta

SEQ ID NO: 180670 - DNA, 14 bp, Unknown
  misc_feature (1)..( 14): Result.005 file - promoters50/2169576
tcagatatacattg

SEQ ID NO: 180671 - DNA, 14 bp, Unknown
  misc_feature (1)..( 14): Result.005 file - promoters50/2169576
acggatttacttga

SEQ ID NO: 180672 - DNA, 14 bp, Unknown
  misc_feature (1)..( 14): Result.005 file - promoters50/2169576
ttttttatagatta

SEQ ID NO: 180673 - DNA, 14 bp, Unknown
  misc_feature (1)..( 14): Result.005 file - promoters50/2169576
acttttttttctga

SEQ ID NO: 180674 - DNA, 14 bp, Unknown
  misc_feature (1)..( 14): Result.005 file - promoters50/2169576
tgacttttctttct

SEQ ID NO: 180675 - DNA, 14 bp, Unknown
  misc_feature (1)..( 14): Result.005 file - promoters50/2169576
caaattttttttct

SEQ ID NO: 180676 - DNA, 14 bp, Unknown
  misc_feature (1)..( 14): Result.005 file - promoters50/2169576
aaactttttttaca

SEQ ID NO: 180677 - DNA, 14 bp, Unknown
  misc_feature (1)..( 14): Result.005 file - promoters50/2169576
tagtttttcttatc

SEQ ID NO: 180678 - DNA, 14 bp, Unknown
  misc_feature (1)..( 14): Result.005 file - promoters50/2169576
ccaatttttagtca

SEQ ID NO: 180679 - DNA, 14 bp, Unknown
  misc_feature (1)..( 14): Result.005 file - promoters50/2169576
aaagttttgagcta

SEQ ID NO: 180680 - DNA, 13 bp, Unknown
  misc_feature (1)..( 13): Result.005 file - promoters50/2169576
tacaatataaaca

SEQ ID NO: 180681 - DNA, 13 bp, Unknown
  misc_feature (1)..( 13): Result.005 file - promoters50/2169576
tcatatatataca

SEQ ID NO: 180682 - DNA, 13 bp, Unknown
  misc_feature (1)..( 13): Result.005 file - promoters50/2169576
tcacatattaaca

SEQ ID NO: 180683 - DNA, 13 bp, Unknown
  misc_feature (1)..( 13): Result.005 file - promoters50/2169576
gtatatataaaga

SEQ ID NO: 180684 - DNA, 13 bp, Unknown
  misc_feature (1)..( 13): Result.005 file - promoters50/2169576
tctcatataaata

SEQ ID NO: 180685 - DNA, 13 bp, Unknown
  misc_feature (1)..( 13): Result.005 file - promoters50/2169576
actcatatatatc

SEQ ID NO: 180686 - DNA, 10 bp, Unknown
  misc_feature (1)..( 10): Result.005 file - promoters50/2184050
aaattattaa

SEQ ID NO: 180687 - DNA, 10 bp, Unknown
  misc_feature (1)..( 10): Result.005 file - promoters50/2184050
aaattactat

SEQ ID NO: 180688 - DNA, 10 bp, Unknown
  misc_feature (1)..( 10): Result.005 file - promoters50/2184050
taattactaa

SEQ ID NO: 180689 - DNA, 9 bp, Unknown
  misc_feature (1)..( 9): Result.005 file - promoters50/2184050
aatataaat

SEQ ID NO: 180690 - DNA, 9 bp, Unknown
  misc_feature (1)..( 9): Result.005 file - promoters50/2184050
gttattaat

SEQ ID NO: 180691 - DNA, 9 bp, Unknown
  misc_feature (1)..( 9): Result.005 file - promoters50/2184050
aatataatt

SEQ ID NO: 180692 - DNA, 13 bp, Unknown
  misc_feature (1)..( 13): Result.005 file - promoters50/2185389
caaaagaaaaaat

SEQ ID NO: 180693 - DNA, 13 bp, Unknown
  misc_feature (1)..( 13): Result.005 file - promoters50/2185389
actaagaaatatg

SEQ ID NO: 180694 - DNA, 13 bp, Unknown
  misc_feature (1)..( 13): Result.005 file - promoters50/2185389
ctgaagaacaaat

SEQ ID NO: 180695 - DNA, 13 bp, Unknown
  misc_feature (1)..( 13): Result.005 file - promoters50/2185389
ttgaagaaaattt

SEQ ID NO: 180696 - DNA, 13 bp, Unknown
  misc_feature (1)..( 13): Result.005 file - promoters50/2185389
aaaaagaagaagg

SEQ ID NO: 180697 - DNA, 13 bp, Unknown
  misc_feature (1)..( 13): Result.005 file - promoters50/2185389
ctgatgaaacaga

SEQ ID NO: 180698 - DNA, 10 bp, Unknown
  misc_feature (1)..( 10): Result.005 file - promoters50/2185389
acaaaaacat

SEQ ID NO: 180699 - DNA, 10 bp, Unknown
  misc_feature (1)..( 10): Result.005 file - promoters50/2185389
acaaaagagc

SEQ ID NO: 180700 - DNA, 10 bp, Unknown
  misc_feature (1)..( 10): Result.005 file - promoters50/2185389
acaaaaaata

SEQ ID NO: 180701 - DNA, 10 bp, Unknown
  misc_feature (1)..( 10): Result.005 file - promoters50/2185389
acaagagaga

SEQ ID NO: 180702 - DNA, 10 bp, Unknown
  misc_feature (1)..( 10): Result.005 file - promoters50/2185389
tcaaaagtga

SEQ ID NO: 180703 - DNA, 10 bp, Unknown
  misc_feature (1)..( 10): Result.005 file - promoters50/2185389
ccaatagaaa

SEQ ID NO: 180704 - DNA, 10 bp, Unknown
  misc_feature (1)..( 10): Result.005 file - promoters50/2185389
gtcaaagaaa

SEQ ID NO: 180705 - DNA, 11 bp, Unknown
  misc_feature (1)..( 11): Result.005 file - promoters50/2187156
ccataattagt

SEQ ID NO: 180706 - DNA, 11 bp, Unknown
  misc_feature (1)..( 11): Result.005 file - promoters50/2187156
ccagaattaag

SEQ ID NO: 180707 - DNA, 11 bp, Unknown
  misc_feature (1)..( 11): Result.005 file - promoters50/2187156
tcataattttg

SEQ ID NO: 180708 - DNA, 11 bp, Unknown
  misc_feature (1)..( 11): Result.005 file - promoters50/2187156
aaatacttaag

SEQ ID NO: 180709 - DNA, 11 bp, Unknown
  misc_feature (1)..( 11): Result.005 file - promoters50/2187156
atgtaattaag

SEQ ID NO: 180710 - DNA, 11 bp, Unknown
  misc_feature (1)..( 11): Result.005 file - promoters50/2187156
tcagaattctg

SEQ ID NO: 180711 - DNA, 11 bp, Unknown
  misc_feature (1)..( 11): Result.005 file - promoters50/2187156
tcagatttacg

SEQ ID NO: 180712 - DNA, 11 bp, Unknown
  misc_feature (1)..( 11): Result.005 file - promoters50/2187156
tcacatttgtt

SEQ ID NO: 180713 - DNA, 12 bp, Unknown
  misc_feature (1)..( 12): Result.005 file - promoters50/2187156
tggtacataatt

SEQ ID NO: 180714 - DNA, 12 bp, Unknown
  misc_feature (1)..( 12): Result.005 file - promoters50/2187156
atgtaaataaaa

SEQ ID NO: 180715 - DNA, 12 bp, Unknown
  misc_feature (1)..( 12): Result.005 file - promoters50/2187156
gtgtaaaaatag

SEQ ID NO: 180716 - DNA, 12 bp, Unknown
  misc_feature (1)..( 12): Result.005 file - promoters50/2187156
agtaaaattaaa

SEQ ID NO: 180717 - DNA, 12 bp, Unknown
  misc_feature (1)..( 12): Result.005 file - promoters50/2187156
atgcaaaatctc

SEQ ID NO: 180718 - DNA, 12 bp, Unknown
  misc_feature (1)..( 12): Result.005 file - promoters50/2187156
atggaaacgacg

SEQ ID NO: 180719 - DNA, 9 bp, Unknown
  misc_feature (1)..( 9): Result.005 file - promoters50/2187156
tcacaattg

SEQ ID NO: 180720 - DNA, 9 bp, Unknown
  misc_feature (1)..( 9): Result.005 file - promoters50/2187156
tcagaattc

SEQ ID NO: 180721 - DNA, 9 bp, Unknown
  misc_feature (1)..( 9): Result.005 file - promoters50/2187156
tcacatttg

SEQ ID NO: 180722 - DNA, 9 bp, Unknown
  misc_feature (1)..( 9): Result.005 file - promoters50/2187156
ccagaatta

SEQ ID NO: 180723 - DNA, 9 bp, Unknown
  misc_feature (1)..( 9): Result.005 file - promoters50/2187156
tcagattta

SEQ ID NO: 180724 - DNA, 9 bp, Unknown
  misc_feature (1)..( 9): Result.005 file - promoters50/2187156
gtagatttg

SEQ ID NO: 180725 - DNA, 8 bp, Unknown
  misc_feature (1)..( 8): Result.005 file - promoters50/2217752
tgatcgaa

SEQ ID NO: 180726 - DNA, 8 bp, Unknown
  misc_feature (1)..( 8): Result.005 file - promoters50/2217752
agatggaa

SEQ ID NO: 180727 - DNA, 8 bp, Unknown
  misc_feature (1)..( 8): Result.005 file - promoters50/2217752
agatcgat

SEQ ID NO: 180728 - DNA, 8 bp, Unknown
  misc_feature (1)..( 8): Result.005 file - promoters50/2217752
agacggag

SEQ ID NO: 180729 - DNA, 8 bp, Unknown
  misc_feature (1)..( 8): Result.005 file - promoters50/2217752
tgatggat

SEQ ID NO: 180730 - DNA, 11 bp, Unknown
  misc_feature (1)..( 11): Result.005 file - promoters50/2217794
agaaacagagg

SEQ ID NO: 180731 - DNA, 11 bp, Unknown
  misc_feature (1)..( 11): Result.005 file - promoters50/2217794
agaaaaagaaa

SEQ ID NO: 180732 - DNA, 11 bp, Unknown
  misc_feature (1)..( 11): Result.005 file - promoters50/2217794
aaaaacagagt

SEQ ID NO: 180733 - DNA, 11 bp, Unknown
  misc_feature (1)..( 11): Result.005 file - promoters50/2217794
ccaaaatgaaa

SEQ ID NO: 180734 - DNA, 11 bp, Unknown
  misc_feature (1)..( 11): Result.005 file - promoters50/2217794
caaaaaataaa

SEQ ID NO: 180735 - DNA, 11 bp, Unknown
  misc_feature (1)..( 11): Result.005 file - promoters50/2217794
ttatccagagt

SEQ ID NO: 180736 - DNA, 12 bp, Unknown
  misc_feature (1)..( 12): Result.005 file - promoters50/2217996
ccagtttatgaa

SEQ ID NO: 180737 - DNA, 12 bp, Unknown
  misc_feature (1)..( 12): Result.005 file - promoters50/2217996
tcagtttctcga

SEQ ID NO: 180738 - DNA, 12 bp, Unknown
  misc_feature (1)..( 12): Result.005 file - promoters50/2217996
tcaattttgcta

SEQ ID NO: 180739 - DNA, 12 bp, Unknown
  misc_feature (1)..( 12): Result.005 file - promoters50/2217996
tcatttttggtt

SEQ ID NO: 180740 - DNA, 12 bp, Unknown
  misc_feature (1)..( 12): Result.005 file - promoters50/2217996
attgttttggtt

SEQ ID NO: 180741 - DNA, 12 bp, Unknown
  misc_feature (1)..( 12): Result.005 file - promoters50/2217996
tcggttttgcag

SEQ ID NO: 180742 - DNA, 8 bp, Unknown
  misc_feature (1)..( 8): Result.005 file - promoters50/2218016
taagaatt

SEQ ID NO: 180743 - DNA, 8 bp, Unknown
  misc_feature (1)..( 8): Result.005 file - promoters50/2218016
taagaaac

SEQ ID NO: 180744 - DNA, 8 bp, Unknown
  misc_feature (1)..( 8): Result.005 file - promoters50/2218016
aaagaaac

SEQ ID NO: 180745 - DNA, 8 bp, Unknown
  misc_feature (1)..( 8): Result.005 file - promoters50/2218184
tcaaaatc

SEQ ID NO: 180746 - DNA, 8 bp, Unknown
  misc_feature (1)..( 8): Result.005 file - promoters50/2218184
ttaaaatc

SEQ ID NO: 180747 - DNA, 8 bp, Unknown
  misc_feature (1)..( 8): Result.005 file - promoters50/2218184
ttataatg

SEQ ID NO: 180748 - DNA, 10 bp, Unknown
  misc_feature (1)..( 10): Result.005 file - promoters50/2218184
acttcataga

SEQ ID NO: 180749 - DNA, 10 bp, Unknown
  misc_feature (1)..( 10): Result.005 file - promoters50/2218184
actttataat

SEQ ID NO: 180750 - DNA, 10 bp, Unknown
  misc_feature (1)..( 10): Result.005 file - promoters50/2218184
acattaaaat

SEQ ID NO: 180751 - DNA, 9 bp, Unknown
  misc_feature (1)..( 9): Result.005 file - promoters50/2218259
agatatttt

SEQ ID NO: 180752 - DNA, 9 bp, Unknown
  misc_feature (1)..( 9): Result.005 file - promoters50/2218259
agatattct

SEQ ID NO: 180753 - DNA, 9 bp, Unknown
  misc_feature (1)..( 9): Result.005 file - promoters50/2218259
tcatatttt

SEQ ID NO: 180754 - DNA, 10 bp, Unknown
  misc_feature (1)..( 10): Result.005 file - promoters50/2218260
ctataaatac

SEQ ID NO: 180755 - DNA, 10 bp, Unknown
  misc_feature (1)..( 10): Result.005 file - promoters50/2218260
gtatatatat

SEQ ID NO: 180756 - DNA, 10 bp, Unknown
  misc_feature (1)..( 10): Result.005 file - promoters50/2218260
atataaatcc

SEQ ID NO: 180757 - DNA, 10 bp, Unknown
  misc_feature (1)..( 10): Result.005 file - promoters50/2218260
gtatttatat

SEQ ID NO: 180758 - DNA, 10 bp, Unknown
  misc_feature (1)..( 10): Result.005 file - promoters50/2218260
caataaaaag

SEQ ID NO: 180759 - DNA, 10 bp, Unknown
  misc_feature (1)..( 10): Result.005 file - promoters50/2218260
cgatttataa

SEQ ID NO: 180760 - DNA, 12 bp, Unknown
  misc_feature (1)..( 12): Result.005 file - promoters50/2218271
ccaaacccaaga

SEQ ID NO: 180761 - DNA, 12 bp, Unknown
  misc_feature (1)..( 12): Result.005 file - promoters50/2218271
tcaaacctgaat

SEQ ID NO: 180762 - DNA, 12 bp, Unknown
  misc_feature (1)..( 12): Result.005 file - promoters50/2218271
gccaaccccaat

SEQ ID NO: 180763 - DNA, 12 bp, Unknown
  misc_feature (1)..( 12): Result.005 file - promoters50/2218271
aaaaactggaga

SEQ ID NO: 180764 - DNA, 12 bp, Unknown
  misc_feature (1)..( 12): Result.005 file - promoters50/2218271
taaaaattggta

SEQ ID NO: 180765 - DNA, 12 bp, Unknown
  misc_feature (1)..( 12): Result.005 file - promoters50/2218271
tcaaaaaaaaaa

SEQ ID NO: 180766 - DNA, 12 bp, Unknown
  misc_feature (1)..( 12): Result.005 file - promoters50/2218271
gaaaaaaaagtt

SEQ ID NO: 180767 - DNA, 11 bp, Unknown
  misc_feature (1)..( 11): Result.005 file - promoters50/2685671
gtattattcaa

SEQ ID NO: 180768 - DNA, 11 bp, Unknown
  misc_feature (1)..( 11): Result.005 file - promoters50/2685671
atatttttcat

SEQ ID NO: 180769 - DNA, 11 bp, Unknown
  misc_feature (1)..( 11): Result.005 file - promoters50/2685671
gaattgaaaca

SEQ ID NO: 180770 - DNA, 11 bp, Unknown
  misc_feature (1)..( 11): Result.005 file - promoters50/2685671
gtataattctt

SEQ ID NO: 180771 - DNA, 11 bp, Unknown
  misc_feature (1)..( 11): Result.005 file - promoters50/2685671
catatatacaa

SEQ ID NO: 180772 - DNA, 11 bp, Unknown
  misc_feature (1)..( 11): Result.005 file - promoters50/2685671
gtttgatttga

SEQ ID NO: 180773 - DNA, 13 bp, Unknown
  misc_feature (1)..( 13): Result.005 file - promoters50/2685671
gaagcccataagg

SEQ ID NO: 180774 - DNA, 13 bp, Unknown
  misc_feature (1)..( 13): Result.005 file - promoters50/2685671
tcggcccatcaaa

SEQ ID NO: 180775 - DNA, 13 bp, Unknown
  misc_feature (1)..( 13): Result.005 file - promoters50/2685671
tgggcctataagg

SEQ ID NO: 180776 - DNA, 13 bp, Unknown
  misc_feature (1)..( 13): Result.005 file - promoters50/2685671
aaagcccaatata

SEQ ID NO: 180777 - DNA, 13 bp, Unknown
  misc_feature (1)..( 13): Result.005 file - promoters50/2685671
aaagccctaatat

SEQ ID NO: 180778 - DNA, 13 bp, Unknown
  misc_feature (1)..( 13): Result.005 file - promoters50/2685671
aaggcccaataac

SEQ ID NO: 180779 - DNA, 9 bp, Unknown
  misc_feature (1)..( 9): Result.005 file - promoters50/2685671
agaaaaatc

SEQ ID NO: 180780 - DNA, 9 bp, Unknown
  misc_feature (1)..( 9): Result.005 file - promoters50/2685671
ataaaaata

SEQ ID NO: 180781 - DNA, 9 bp, Unknown
  misc_feature (1)..( 9): Result.005 file - promoters50/2685671
tgaaaaata

SEQ ID NO: 180782 - DNA, 9 bp, Unknown
  misc_feature (1)..( 9): Result.005 file - promoters50/2685671
tgaaaagaa

SEQ ID NO: 180783 - DNA, 9 bp, Unknown
  misc_feature (1)..( 9): Result.005 file - promoters50/2685671
agaaaaaaa

SEQ ID NO: 180784 - DNA, 9 bp, Unknown
  misc_feature (1)..( 9): Result.005 file - promoters50/2685671
tcaaatata

SEQ ID NO: 180785 - DNA, 8 bp, Unknown
  misc_feature (1)..( 8): Result.005 file - promoters50/2685671
gttacaaa

SEQ ID NO: 180786 - DNA, 8 bp, Unknown
  misc_feature (1)..( 8): Result.005 file - promoters50/2685671
tttaaaaa

SEQ ID NO: 180787 - DNA, 8 bp, Unknown
  misc_feature (1)..( 8): Result.005 file - promoters50/2685671
attaaaaa

SEQ ID NO: 180788 - DNA, 8 bp, Unknown
  misc_feature (1)..( 8): Result.005 file - promoters50/2685671
tttagaaa

SEQ ID NO: 180789 - DNA, 8 bp, Unknown
  misc_feature (1)..( 8): Result.005 file - promoters50/2685671
tttaaaat

SEQ ID NO: 180790 - DNA, 8 bp, Unknown
  misc_feature (1)..( 8): Result.005 file - promoters50/2685671
cttagaaa

SEQ ID NO: 180791 - DNA, 10 bp, Unknown
  misc_feature (1)..( 10): Result.005 file - promoters50/2685712
ggtttaggtg

SEQ ID NO: 180792 - DNA, 10 bp, Unknown
  misc_feature (1)..( 10): Result.005 file - promoters50/2685712
ggtttaggtg

SEQ ID NO: 180793 - DNA, 10 bp, Unknown
  misc_feature (1)..( 10): Result.005 file - promoters50/2685712
tgttttggtt

SEQ ID NO: 180794 - DNA, 10 bp, Unknown
  misc_feature (1)..( 10): Result.005 file - promoters50/2685712
ggtttagttg

SEQ ID NO: 180795 - DNA, 10 bp, Unknown
  misc_feature (1)..( 10): Result.005 file - promoters50/2685712
ggttttgaaa

SEQ ID NO: 180796 - DNA, 8 bp, Unknown
  misc_feature (1)..( 8): Result.005 file - promoters50/2685712
tctcattg

SEQ ID NO: 180797 - DNA, 8 bp, Unknown
  misc_feature (1)..( 8): Result.005 file - promoters50/2685712
tcttatta

SEQ ID NO: 180798 - DNA, 8 bp, Unknown
  misc_feature (1)..( 8): Result.005 file - promoters50/2685712
tcttttaa

SEQ ID NO: 180799 - DNA, 8 bp, Unknown
  misc_feature (1)..( 8): Result.005 file - promoters50/2685712
tattttaa

SEQ ID NO: 180800 - DNA, 8 bp, Unknown
  misc_feature (1)..( 8): Result.005 file - promoters50/2685725
ttataatg

SEQ ID NO: 180801 - DNA, 8 bp, Unknown
  misc_feature (1)..( 8): Result.005 file - promoters50/2685725
ctatcatg

SEQ ID NO: 180802 - DNA, 8 bp, Unknown
  misc_feature (1)..( 8): Result.005 file - promoters50/2685725
ttataaac

SEQ ID NO: 180803 - DNA, 9 bp, Unknown
  misc_feature (1)..( 9): Result.005 file - promoters50/2685725
gtaaggttc

SEQ ID NO: 180804 - DNA, 9 bp, Unknown
  misc_feature (1)..( 9): Result.005 file - promoters50/2685725
agaaggttc

SEQ ID NO: 180805 - DNA, 9 bp, Unknown
  misc_feature (1)..( 9): Result.005 file - promoters50/2685725
agatggttc

SEQ ID NO: 180806 - DNA, 11 bp, Unknown
  misc_feature (1)..( 11): Result.005 file - promoters50/2685725
gaagagttatt

SEQ ID NO: 180807 - DNA, 11 bp, Unknown
  misc_feature (1)..( 11): Result.005 file - promoters50/2685725
gaaaagttaaa

SEQ ID NO: 180808 - DNA, 11 bp, Unknown
  misc_feature (1)..( 11): Result.005 file - promoters50/2685725
tgaaagtcaaa

SEQ ID NO: 180809 - DNA, 21 bp, Unknown
  misc_feature (1)..( 21): Result.005 file - promoters50/2685873
aaataacaattgaagaacttc

SEQ ID NO: 180810 - DNA, 21 bp, Unknown
  misc_feature (1)..( 21): Result.005 file - promoters50/2685873
agaaaacaattttctatcaac

SEQ ID NO: 180811 - DNA, 21 bp, Unknown
  misc_feature (1)..( 21): Result.005 file - promoters50/2685873
aaattacaaaaaaattcacgg

SEQ ID NO: 180812 - DNA, 21 bp, Unknown
  misc_feature (1)..( 21): Result.005 file - promoters50/2685873
tttattcaattttttaaatta

SEQ ID NO: 180813 - DNA, 21 bp, Unknown
  misc_feature (1)..( 21): Result.005 file - promoters50/2685873
aatgagaaatttataaagaaa

SEQ ID NO: 180814 - DNA, 21 bp, Unknown
  misc_feature (1)..( 21): Result.005 file - promoters50/2685873
tccaatcaatctttaagcttg

SEQ ID NO: 180815 - DNA, 13 bp, Unknown
  misc_feature (1)..( 13): Result.005 file - promoters50/2685873
aagaacttctaag

SEQ ID NO: 180816 - DNA, 13 bp, Unknown
  misc_feature (1)..( 13): Result.005 file - promoters50/2685873
aagaaccaatggt

SEQ ID NO: 180817 - DNA, 13 bp, Unknown
  misc_feature (1)..( 13): Result.005 file - promoters50/2685873
aagatcttttagt

SEQ ID NO: 180818 - DNA, 13 bp, Unknown
  misc_feature (1)..( 13): Result.005 file - promoters50/2685873
ttgatcttaccag

SEQ ID NO: 180819 - DNA, 13 bp, Unknown
  misc_feature (1)..( 13): Result.005 file - promoters50/2685873
tcaatctttaagc

SEQ ID NO: 180820 - DNA, 13 bp, Unknown
  misc_feature (1)..( 13): Result.005 file - promoters50/2685873
ttattcaattttt

SEQ ID NO: 180821 - DNA, 10 bp, Unknown
  misc_feature (1)..( 10): Result.005 file - promoters50/2685873
ctataagaac

SEQ ID NO: 180822 - DNA, 10 bp, Unknown
  misc_feature (1)..( 10): Result.005 file - promoters50/2685873
ctataaatat

SEQ ID NO: 180823 - DNA, 10 bp, Unknown
  misc_feature (1)..( 10): Result.005 file - promoters50/2685873
ctataaaaaa

SEQ ID NO: 180824 - DNA, 10 bp, Unknown
  misc_feature (1)..( 10): Result.005 file - promoters50/2685873
atataaatag

SEQ ID NO: 180825 - DNA, 10 bp, Unknown
  misc_feature (1)..( 10): Result.005 file - promoters50/2685873
atataaataa

SEQ ID NO: 180826 - DNA, 10 bp, Unknown
  misc_feature (1)..( 10): Result.005 file - promoters50/2685873
atataaacac

SEQ ID NO: 180827 - DNA, 10 bp, Unknown
  misc_feature (1)..( 10): Result.005 file - promoters50/2685873
aaataaaaaa

SEQ ID NO: 180828 - DNA, 8 bp, Unknown
  misc_feature (1)..( 8): Result.005 file - promoters50/2685877
cttgttta

SEQ ID NO: 180829 - DNA, 8 bp, Unknown
  misc_feature (1)..( 8): Result.005 file - promoters50/2685877
cttgttct

SEQ ID NO: 180830 - DNA, 9 bp, Unknown
  misc_feature (1)..( 9): Result.005 file - promoters50/2685877
tttgattat

SEQ ID NO: 180831 - DNA, 9 bp, Unknown
  misc_feature (1)..( 9): Result.005 file - promoters50/2685877
tttgatatt

SEQ ID NO: 180832 - DNA, 8 bp, Unknown
  misc_feature (1)..( 8): Result.005 file - promoters50/2685877
ccatatta

SEQ ID NO: 180833 - DNA, 8 bp, Unknown
  misc_feature (1)..( 8): Result.005 file - promoters50/2685877
tgatatta

SEQ ID NO: 180834 - DNA, 8 bp, Unknown
  misc_feature (1)..( 8): Result.005 file - promoters50/2685877
ccaaattc

SEQ ID NO: 180835 - DNA, 8 bp, Unknown
  misc_feature (1)..( 8): Result.005 file - promoters50/2685877
tgatattt

SEQ ID NO: 180836 - DNA, 11 bp, Unknown
  misc_feature (1)..( 11): Result.005 file - promoters50/2685877
ttggactattg

SEQ ID NO: 180837 - DNA, 11 bp, Unknown
  misc_feature (1)..( 11): Result.005 file - promoters50/2685877
gtggaatatat

SEQ ID NO: 180838 - DNA, 11 bp, Unknown
  misc_feature (1)..( 11): Result.005 file - promoters50/2685877
ttgcactaaaa

SEQ ID NO: 180839 - DNA, 11 bp, Unknown
  misc_feature (1)..( 11): Result.005 file - promoters50/2685877
caccaccaaaa

SEQ ID NO: 180840 - DNA, 17 bp, Unknown
  misc_feature (1)..( 17): Result.005 file - promoters50/2685931
cagttctctttgatggg

SEQ ID NO: 180841 - DNA, 17 bp, Unknown
  misc_feature (1)..( 17): Result.005 file - promoters50/2685931
atttattctttgaactt

SEQ ID NO: 180842 - DNA, 18 bp, Unknown
  misc_feature (1)..( 18): Result.005 file - promoters50/2685931
gacgattctgtttcgacc

SEQ ID NO: 180843 - DNA, 18 bp, Unknown
  misc_feature (1)..( 18): Result.005 file - promoters50/2685931
ttgagatcttggaagcaa

SEQ ID NO: 180844 - DNA, 18 bp, Unknown
  misc_feature (1)..( 18): Result.005 file - promoters50/2685931
attaattatttcttacag

SEQ ID NO: 180845 - DNA, 18 bp, Unknown
  misc_feature (1)..( 18): Result.005 file - promoters50/2685931
tataattattttaactta

SEQ ID NO: 180846 - DNA, 9 bp, Unknown
  misc_feature (1)..( 9): Result.005 file - promoters50/2685931
cacatcaaa

SEQ ID NO: 180847 - DNA, 9 bp, Unknown
  misc_feature (1)..( 9): Result.005 file - promoters50/2685931
aacattaaa

SEQ ID NO: 180848 - DNA, 9 bp, Unknown
  misc_feature (1)..( 9): Result.005 file - promoters50/2685931
cacattatc

SEQ ID NO: 180849 - DNA, 9 bp, Unknown
  misc_feature (1)..( 9): Result.005 file - promoters50/2685931
aacatttaa

SEQ ID NO: 180850 - DNA, 9 bp, Unknown
  misc_feature (1)..( 9): Result.005 file - promoters50/2685931
tttattaaa

SEQ ID NO: 180851 - DNA, 9 bp, Unknown
  misc_feature (1)..( 9): Result.005 file - promoters50/2685931
aaccttttt

SEQ ID NO: 180852 - DNA, 9 bp, Unknown
  misc_feature (1)..( 9): Result.005 file - promoters50/2685931
gttattaat

SEQ ID NO: 180853 - DNA, 8 bp, Unknown
  misc_feature (1)..( 8): Result.005 file - promoters50/2685931
atttgttt

SEQ ID NO: 180854 - DNA, 8 bp, Unknown
  misc_feature (1)..( 8): Result.005 file - promoters50/2685931
atttattt

SEQ ID NO: 180855 - DNA, 8 bp, Unknown
  misc_feature (1)..( 8): Result.005 file - promoters50/2685931
attcgttt

SEQ ID NO: 180856 - DNA, 8 bp, Unknown
  misc_feature (1)..( 8): Result.005 file - promoters50/2685931
ctttatta

SEQ ID NO: 180857 - DNA, 8 bp, Unknown
  misc_feature (1)..( 8): Result.005 file - promoters50/2685931
atttattt

SEQ ID NO: 180858 - DNA, 8 bp, Unknown
  misc_feature (1)..( 8): Result.005 file - promoters50/2685931
atttattg

SEQ ID NO: 180859 - DNA, 11 bp, Unknown
  misc_feature (1)..( 11): Result.005 file - promoters50/2685951
atctaaaatca

SEQ ID NO: 180860 - DNA, 11 bp, Unknown
  misc_feature (1)..( 11): Result.005 file - promoters50/2685951
atctgaaatat

SEQ ID NO: 180861 - DNA, 11 bp, Unknown
  misc_feature (1)..( 11): Result.005 file - promoters50/2685951
ttataaaatac

SEQ ID NO: 180862 - DNA, 11 bp, Unknown
  misc_feature (1)..( 11): Result.005 file - promoters50/2685951
ttctaaaatct

SEQ ID NO: 180863 - DNA, 11 bp, Unknown
  misc_feature (1)..( 11): Result.005 file - promoters50/2685951
atcagaagaag

SEQ ID NO: 180864 - DNA, 11 bp, Unknown
  misc_feature (1)..( 11): Result.005 file - promoters50/2685951
gtttgatatat

SEQ ID NO: 180865 - DNA, 11 bp, Unknown
  misc_feature (1)..( 11): Result.005 file - promoters50/2685951
caatgatattc

SEQ ID NO: 180866 - DNA, 14 bp, Unknown
  misc_feature (1)..( 14): Result.005 file - promoters50/2685951
aaaaattaacaaac

SEQ ID NO: 180867 - DNA, 14 bp, Unknown
  misc_feature (1)..( 14): Result.005 file - promoters50/2685951
aaaaagtaaacata

SEQ ID NO: 180868 - DNA, 14 bp, Unknown
  misc_feature (1)..( 14): Result.005 file - promoters50/2685951
aaaaatctcgtgtg

SEQ ID NO: 180869 - DNA, 14 bp, Unknown
  misc_feature (1)..( 14): Result.005 file - promoters50/2685951
aaagatcataaaat

SEQ ID NO: 180870 - DNA, 14 bp, Unknown
  misc_feature (1)..( 14): Result.005 file - promoters50/2685951
ctagatcatgaaat

SEQ ID NO: 180871 - DNA, 14 bp, Unknown
  misc_feature (1)..( 14): Result.005 file - promoters50/2685951
ggagatcaaatagg

SEQ ID NO: 180872 - DNA, 8 bp, Unknown
  misc_feature (1)..( 8): Result.005 file - promoters50/2685968
agaagata

SEQ ID NO: 180873 - DNA, 8 bp, Unknown
  misc_feature (1)..( 8): Result.005 file - promoters50/2685968
tgaaaata

SEQ ID NO: 180874 - DNA, 8 bp, Unknown
  misc_feature (1)..( 8): Result.005 file - promoters50/2685968
tgacaatt

SEQ ID NO: 180875 - DNA, 8 bp, Unknown
  misc_feature (1)..( 8): Result.005 file - promoters50/2685968
tcaaaata

SEQ ID NO: 180876 - DNA, 8 bp, Unknown
  misc_feature (1)..( 8): Result.005 file - promoters50/2685968
tgaaaagg

SEQ ID NO: 180877 - DNA, 8 bp, Unknown
  misc_feature (1)..( 8): Result.005 file - promoters50/2685968
gaacaaat

SEQ ID NO: 180878 - DNA, 8 bp, Unknown
  misc_feature (1)..( 8): Result.005 file - promoters50/2685968
gaacaata

SEQ ID NO: 180879 - DNA, 8 bp, Unknown
  misc_feature (1)..( 8): Result.005 file - promoters50/2685968
aaacaaaa

SEQ ID NO: 180880 - DNA, 8 bp, Unknown
  misc_feature (1)..( 8): Result.005 file - promoters50/2685968
aaagaaaa

SEQ ID NO: 180881 - DNA, 10 bp, Unknown
  misc_feature (1)..( 10): Result.005 file - promoters50/2685968
tattatttgt

SEQ ID NO: 180882 - DNA, 10 bp, Unknown
  misc_feature (1)..( 10): Result.005 file - promoters50/2685968
aattatgtgt

SEQ ID NO: 180883 - DNA, 10 bp, Unknown
  misc_feature (1)..( 10): Result.005 file - promoters50/2685968
tattttttta

SEQ ID NO: 180884 - DNA, 10 bp, Unknown
  misc_feature (1)..( 10): Result.005 file - promoters50/2685968
ttttattttg

SEQ ID NO: 180885 - DNA, 10 bp, Unknown
  misc_feature (1)..( 10): Result.005 file - promoters50/2685968
aattatttta

SEQ ID NO: 180886 - DNA, 10 bp, Unknown
  misc_feature (1)..( 10): Result.005 file - promoters50/2685968
tgtcaaacat

SEQ ID NO: 180887 - DNA, 10 bp, Unknown
  misc_feature (1)..( 10): Result.005 file - promoters50/2685968
tgttaaaagc

SEQ ID NO: 180888 - DNA, 10 bp, Unknown
  misc_feature (1)..( 10): Result.005 file - promoters50/2685968
ttttaaaaaa

SEQ ID NO: 180889 - DNA, 11 bp, Unknown
  misc_feature (1)..( 11): Result.005 file - promoters50/2685968
cattaacaaat

SEQ ID NO: 180890 - DNA, 13 bp, Unknown
  misc_feature (1)..( 13): Result.005 file - promoters50/2685968
aaaaacttgtttt

SEQ ID NO: 180891 - DNA, 13 bp, Unknown
  misc_feature (1)..( 13): Result.005 file - promoters50/2685968
aaaaactactaca

SEQ ID NO: 180892 - DNA, 13 bp, Unknown
  misc_feature (1)..( 13): Result.005 file - promoters50/2685968
acaaatttgtttt

SEQ ID NO: 180893 - DNA, 13 bp, Unknown
  misc_feature (1)..( 13): Result.005 file - promoters50/2685968
gcaaatttttaaa

SEQ ID NO: 180894 - DNA, 11 bp, Unknown
  misc_feature (1)..( 11): Result.005 file - promoters50/2685968
tttgattttaa

SEQ ID NO: 180895 - DNA, 11 bp, Unknown
  misc_feature (1)..( 11): Result.005 file - promoters50/2685968
tttgattaaca

SEQ ID NO: 180896 - DNA, 11 bp, Unknown
  misc_feature (1)..( 11): Result.005 file - promoters50/2685968
ttttattttgt

SEQ ID NO: 180897 - DNA, 11 bp, Unknown
  misc_feature (1)..( 11): Result.005 file - promoters50/2685968
ttaaattatgt

SEQ ID NO: 180898 - DNA, 11 bp, Unknown
  misc_feature (1)..( 11): Result.005 file - promoters50/2685968
ttgcattttaa

SEQ ID NO: 180899 - DNA, 8 bp, Unknown
  misc_feature (1)..( 8): Result.005 file - promoters50/2685968
tttttaaa

SEQ ID NO: 180900 - DNA, 8 bp, Unknown
  misc_feature (1)..( 8): Result.005 file - promoters50/2685968
tttttaaa

SEQ ID NO: 180901 - DNA, 8 bp, Unknown
  misc_feature (1)..( 8): Result.005 file - promoters50/2685968
attttaat

SEQ ID NO: 180902 - DNA, 8 bp, Unknown
  misc_feature (1)..( 8): Result.005 file - promoters50/2685968
attttatt

SEQ ID NO: 180903 - DNA, 10 bp, Unknown
  misc_feature (1)..( 10): Result.005 file - promoters50/2685968
taaaatttgc

SEQ ID NO: 180904 - DNA, 10 bp, Unknown
  misc_feature (1)..( 10): Result.005 file - promoters50/2685968
taatattata

SEQ ID NO: 180905 - DNA, 10 bp, Unknown
  misc_feature (1)..( 10): Result.005 file - promoters50/2685968
caaaacaaaa

SEQ ID NO: 180906 - DNA, 10 bp, Unknown
  misc_feature (1)..( 10): Result.005 file - promoters50/2685968
caaaaccttt

SEQ ID NO: 180907 - DNA, 10 bp, Unknown
  misc_feature (1)..( 10): Result.005 file - promoters50/2686138
ggtcaaatat

SEQ ID NO: 180908 - DNA, 10 bp, Unknown
  misc_feature (1)..( 10): Result.005 file - promoters50/2686138
aaacaattat

SEQ ID NO: 180909 - DNA, 10 bp, Unknown
  misc_feature (1)..( 10): Result.005 file - promoters50/2686138
aaacgattcc

SEQ ID NO: 180910 - DNA, 7 bp, Unknown
  misc_feature (1)..( 7): Result.005 file - promoters50/2686138
attttgt

SEQ ID NO: 180911 - DNA, 7 bp, Unknown
  misc_feature (1)..( 7): Result.005 file - promoters50/2686138
tttttgt

SEQ ID NO: 180912 - DNA, 7 bp, Unknown
  misc_feature (1)..( 7): Result.005 file - promoters50/2686138
attttgt

SEQ ID NO: 180913 - DNA, 9 bp, Unknown
  misc_feature (1)..( 9): Result.005 file - promoters50/2686138
tataattaa

SEQ ID NO: 180914 - DNA, 9 bp, Unknown
  misc_feature (1)..( 9): Result.005 file - promoters50/2686138
tatgatttc

SEQ ID NO: 180915 - DNA, 9 bp, Unknown
  misc_feature (1)..( 9): Result.005 file - promoters50/2686138
cttaactaa

SEQ ID NO: 180916 - DNA, 7 bp, Unknown
  misc_feature (1)..( 7): Result.005 file - promoters50/2686138
aaataaa

SEQ ID NO: 180917 - DNA, 7 bp, Unknown
  misc_feature (1)..( 7): Result.005 file - promoters50/2686138
aaataat

SEQ ID NO: 180918 - DNA, 7 bp, Unknown
  misc_feature (1)..( 7): Result.005 file - promoters50/2686138
taataat

SEQ ID NO: 180919 - DNA, 9 bp, Unknown
  misc_feature (1)..( 9): Result.005 file - promoters50/2686438
tgcatttta

SEQ ID NO: 180920 - DNA, 9 bp, Unknown
  misc_feature (1)..( 9): Result.005 file - promoters50/2686438
tgcatttat

SEQ ID NO: 180921 - DNA, 9 bp, Unknown
  misc_feature (1)..( 9): Result.005 file - promoters50/2686438
atcatttta

SEQ ID NO: 180922 - DNA, 9 bp, Unknown
  misc_feature (1)..( 9): Result.005 file - promoters50/2686438
aaatagaat

SEQ ID NO: 180923 - DNA, 9 bp, Unknown
  misc_feature (1)..( 9): Result.005 file - promoters50/2686438
aaatagtct

SEQ ID NO: 180924 - DNA, 9 bp, Unknown
  misc_feature (1)..( 9): Result.005 file - promoters50/2686438
taatactct

SEQ ID NO: 180925 - DNA, 9 bp, Unknown
  misc_feature (1)..( 9): Result.005 file - promoters50/2686438
ataaagatt

SEQ ID NO: 180926 - DNA, 9 bp, Unknown
  misc_feature (1)..( 9): Result.005 file - promoters50/2686438
ataaagagt

SEQ ID NO: 180927 - DNA, 9 bp, Unknown
  misc_feature (1)..( 9): Result.005 file - promoters50/2686438
acaaagatt

SEQ ID NO: 180928 - DNA, 12 bp, Unknown
  misc_feature (1)..( 12): Result.005 file - promoters50/2686438
accaaaatagat

SEQ ID NO: 180929 - DNA, 12 bp, Unknown
  misc_feature (1)..( 12): Result.005 file - promoters50/2686438
cacaatataaat

SEQ ID NO: 180930 - DNA, 12 bp, Unknown
  misc_feature (1)..( 12): Result.005 file - promoters50/2686438
tacaaaaattag

SEQ ID NO: 180931 - DNA, 12 bp, Unknown
  misc_feature (1)..( 12): Result.005 file - promoters50/2686438
ttcagaatttaa

SEQ ID NO: 180932 - DNA, 7 bp, Unknown
  misc_feature (1)..( 7): Result.005 file - promoters50/2686438
acacaag

SEQ ID NO: 180933 - DNA, 7 bp, Unknown
  misc_feature (1)..( 7): Result.005 file - promoters50/2686438
gcacaag

SEQ ID NO: 180934 - DNA, 7 bp, Unknown
  misc_feature (1)..( 7): Result.005 file - promoters50/2686438
acacaaa

SEQ ID NO: 180935 - DNA, 10 bp, Unknown
  misc_feature (1)..( 10): Result.005 file - promoters50/2704717
aaagattcca

SEQ ID NO: 180936 - DNA, 10 bp, Unknown
  misc_feature (1)..( 10): Result.005 file - promoters50/2704717
aaagatccag

SEQ ID NO: 180937 - DNA, 10 bp, Unknown
  misc_feature (1)..( 10): Result.005 file - promoters50/2704717
aaacatttaa

SEQ ID NO: 180938 - DNA, 10 bp, Unknown
  misc_feature (1)..( 10): Result.005 file - promoters50/2704717
aaaaatcagg

SEQ ID NO: 180939 - DNA, 10 bp, Unknown
  misc_feature (1)..( 10): Result.005 file - promoters50/2704717
atacatttaa

SEQ ID NO: 180940 - DNA, 15 bp, Unknown
  misc_feature (1)..( 15): Result.005 file - promoters50/2704717
caccaagaactggtt

SEQ ID NO: 180941 - DNA, 15 bp, Unknown
  misc_feature (1)..( 15): Result.005 file - promoters50/2704717
aaccatgaaaaccgc

SEQ ID NO: 180942 - DNA, 15 bp, Unknown
  misc_feature (1)..( 15): Result.005 file - promoters50/2704717
cacgaagaaacaaaa

SEQ ID NO: 180943 - DNA, 15 bp, Unknown
  misc_feature (1)..( 15): Result.005 file - promoters50/2704717
aatgaagaaataaaa

SEQ ID NO: 180944 - DNA, 15 bp, Unknown
  misc_feature (1)..( 15): Result.005 file - promoters50/2704717
cataacaaaataaaa

SEQ ID NO: 180945 - DNA, 8 bp, Unknown
  misc_feature (1)..( 8): Result.005 file - promoters50/2724399
acaggtat

SEQ ID NO: 180946 - DNA, 8 bp, Unknown
  misc_feature (1)..( 8): Result.005 file - promoters50/2724399
tcagatat

SEQ ID NO: 180947 - DNA, 8 bp, Unknown
  misc_feature (1)..( 8): Result.005 file - promoters50/2724399
tcagattc

SEQ ID NO: 180948 - DNA, 12 bp, Unknown
  misc_feature (1)..( 12): Result.005 file - promoters50/2724473
tatcattaatgt

SEQ ID NO: 180949 - DNA, 12 bp, Unknown
  misc_feature (1)..( 12): Result.005 file - promoters50/2724473
caacatgaatgt

SEQ ID NO: 180950 - DNA, 12 bp, Unknown
  misc_feature (1)..( 12): Result.005 file - promoters50/2724473
tatcagtaaacc

SEQ ID NO: 180951 - DNA, 16 bp, Unknown
  misc_feature (1)..( 16): Result.005 file - promoters50/2724473
tttttctttctcctca

SEQ ID NO: 180952 - DNA, 16 bp, Unknown
  misc_feature (1)..( 16): Result.005 file - promoters50/2724473
taattctgtctcatca

SEQ ID NO: 180953 - DNA, 16 bp, Unknown
  misc_feature (1)..( 16): Result.005 file - promoters50/2724473
taattcggtccaagta

SEQ ID NO: 180954 - DNA, 8 bp, Unknown
  misc_feature (1)..( 8): Result.005 file - promoters50/2724473
cataataa

SEQ ID NO: 180955 - DNA, 8 bp, Unknown
  misc_feature (1)..( 8): Result.005 file - promoters50/2724473
gatagtaa

SEQ ID NO: 180956 - DNA, 8 bp, Unknown
  misc_feature (1)..( 8): Result.005 file - promoters50/2724473
gattgtaa

SEQ ID NO: 180957 - DNA, 8 bp, Unknown
  misc_feature (1)..( 8): Result.005 file - promoters50/2724473
aattaatt

SEQ ID NO: 180958 - DNA, 8 bp, Unknown
  misc_feature (1)..( 8): Result.005 file - promoters50/2724473
aatttatt

SEQ ID NO: 180959 - DNA, 8 bp, Unknown
  misc_feature (1)..( 8): Result.005 file - promoters50/2724473
aatttacg

SEQ ID NO: 180960 - DNA, 18 bp, Unknown
  misc_feature (1)..( 18): Result.005 file - promoters50/2724699
caatattttactaatctc

SEQ ID NO: 180961 - DNA, 18 bp, Unknown
  misc_feature (1)..( 18): Result.005 file - promoters50/2724699
aaatgtttttaccataat

SEQ ID NO: 180962 - DNA, 18 bp, Unknown
  misc_feature (1)..( 18): Result.005 file - promoters50/2724699
aaaagtttagggaaaatg

SEQ ID NO: 180963 - DNA, 15 bp, Unknown
  misc_feature (1)..( 15): Result.005 file - promoters50/2724699
agtttagggaaaatg

SEQ ID NO: 180964 - DNA, 7 bp, Unknown
  misc_feature (1)..( 7): Result.005 file - promoters50/2724699
cattatc

SEQ ID NO: 180965 - DNA, 7 bp, Unknown
  misc_feature (1)..( 7): Result.005 file - promoters50/2724699
cattata

SEQ ID NO: 180966 - DNA, 7 bp, Unknown
  misc_feature (1)..( 7): Result.005 file - promoters50/2724699
aattatc

SEQ ID NO: 180967 - DNA, 7 bp, Unknown
  misc_feature (1)..( 7): Result.005 file - promoters50/2724699
aattatc

SEQ ID NO: 180968 - DNA, 7 bp, Unknown
  misc_feature (1)..( 7): Result.005 file - promoters50/2724699
gaaaatg

SEQ ID NO: 180969 - DNA, 7 bp, Unknown
  misc_feature (1)..( 7): Result.005 file - promoters50/2724699
gaaaatg

SEQ ID NO: 180970 - DNA, 7 bp, Unknown
  misc_feature (1)..( 7): Result.005 file - promoters50/2724699
gaaaatg

SEQ ID NO: 180971 - DNA, 8 bp, Unknown
  misc_feature (1)..( 8): Result.005 file - promoters50/2724699
aatatttt

SEQ ID NO: 180972 - DNA, 8 bp, Unknown
  misc_feature (1)..( 8): Result.005 file - promoters50/2724699
aatgtttt

SEQ ID NO: 180973 - DNA, 8 bp, Unknown
  misc_feature (1)..( 8): Result.005 file - promoters50/2724699
aatgtttt

SEQ ID NO: 180974 - DNA, 6 bp, Unknown
  misc_feature (1)..( 6): Result.005 file - promoters50/2724699
ttttac

SEQ ID NO: 180975 - DNA, 6 bp, Unknown
  misc_feature (1)..( 6): Result.005 file - promoters50/2724699
ttttac

SEQ ID NO: 180976 - DNA, 6 bp, Unknown
  misc_feature (1)..( 6): Result.005 file - promoters50/2724699
ttttac

SEQ ID NO: 180977 - DNA, 9 bp, Unknown
  misc_feature (1)..( 9): Result.005 file - promoters50/2724699
acatttaat

SEQ ID NO: 180978 - DNA, 9 bp, Unknown
  misc_feature (1)..( 9): Result.005 file - promoters50/2724699
acattcaat

SEQ ID NO: 180979 - DNA, 9 bp, Unknown
  misc_feature (1)..( 9): Result.005 file - promoters50/2724699
acattcaat

SEQ ID NO: 180980 - DNA, 6 bp, Unknown
  misc_feature (1)..( 6): Result.005 file - promoters50/2724699
cattat

SEQ ID NO: 180981 - DNA, 6 bp, Unknown
  misc_feature (1)..( 6): Result.005 file - promoters50/2724699
cattat

SEQ ID NO: 180982 - DNA, 6 bp, Unknown
  misc_feature (1)..( 6): Result.005 file - promoters50/2724699
cattat

SEQ ID NO: 180983 - DNA, 7 bp, Unknown
  misc_feature (1)..( 7): Result.005 file - promoters50/2724699
acggaaa

SEQ ID NO: 180984 - DNA, 7 bp, Unknown
  misc_feature (1)..( 7): Result.005 file - promoters50/2724699
acgcaaa

SEQ ID NO: 180985 - DNA, 7 bp, Unknown
  misc_feature (1)..( 7): Result.005 file - promoters50/2724699
acgcaaa

SEQ ID NO: 180986 - DNA, 8 bp, Unknown
  misc_feature (1)..( 8): Result.005 file - promoters50/2724703
tctcagag

SEQ ID NO: 180987 - DNA, 8 bp, Unknown
  misc_feature (1)..( 8): Result.005 file - promoters50/2724703
tctaagat

SEQ ID NO: 180988 - DNA, 8 bp, Unknown
  misc_feature (1)..( 8): Result.005 file - promoters50/2724703
tatcagag

SEQ ID NO: 180989 - DNA, 12 bp, Unknown
  misc_feature (1)..( 12): Result.005 file - promoters50/2724703
tgtatcaaaacg

SEQ ID NO: 180990 - DNA, 12 bp, Unknown
  misc_feature (1)..( 12): Result.005 file - promoters50/2724703
aaaaacaaaaca

SEQ ID NO: 180991 - DNA, 12 bp, Unknown
  misc_feature (1)..( 12): Result.005 file - promoters50/2724703
aaacacaataca

SEQ ID NO: 180992 - DNA, 9 bp, Unknown
  misc_feature (1)..( 9): Result.005 file - promoters50/2724703
tatttaaaa

SEQ ID NO: 180993 - DNA, 9 bp, Unknown
  misc_feature (1)..( 9): Result.005 file - promoters50/2724703
tatttatcc

SEQ ID NO: 180994 - DNA, 9 bp, Unknown
  misc_feature (1)..( 9): Result.005 file - promoters50/2724703
aattaaaaa

SEQ ID NO: 180995 - DNA, 8 bp, Unknown
  misc_feature (1)..( 8): Result.005 file - promoters50/2724703
aaagactg

SEQ ID NO: 180996 - DNA, 8 bp, Unknown
  misc_feature (1)..( 8): Result.005 file - promoters50/2724703
aaaaacta

SEQ ID NO: 180997 - DNA, 8 bp, Unknown
  misc_feature (1)..( 8): Result.005 file - promoters50/2724703
aaaataag

SEQ ID NO: 180998 - DNA, 7 bp, Unknown
  misc_feature (1)..( 7): Result.005 file - promoters50/2724703
ttttggt

SEQ ID NO: 180999 - DNA, 7 bp, Unknown
  misc_feature (1)..( 7): Result.005 file - promoters50/2724703
ctttggt

SEQ ID NO: 181000 - DNA, 7 bp, Unknown
  misc_feature (1)..( 7): Result.005 file - promoters50/2724703
ttttgga

SEQ ID NO: 181001 - DNA, 8 bp, Unknown
  misc_feature (1)..( 8): Result.005 file - promoters50/2724703
ttaaccca

SEQ ID NO: 181002 - DNA, 8 bp, Unknown
  misc_feature (1)..( 8): Result.005 file - promoters50/2724703
ttatccca

SEQ ID NO: 181003 - DNA, 8 bp, Unknown
  misc_feature (1)..( 8): Result.005 file - promoters50/2724703
ataaccct

SEQ ID NO: 181004 - DNA, 7 bp, Unknown
  misc_feature (1)..( 7): Result.005 file - promoters50/2724703
agatata

SEQ ID NO: 181005 - DNA, 7 bp, Unknown
  misc_feature (1)..( 7): Result.005 file - promoters50/2724703
agagata

SEQ ID NO: 181006 - DNA, 7 bp, Unknown
  misc_feature (1)..( 7): Result.005 file - promoters50/2724703
agagatt

SEQ ID NO: 181007 - DNA, 10 bp, Unknown
  misc_feature (1)..( 10): Result.005 file - promoters50/2724724
tatgacttga

SEQ ID NO: 181008 - DNA, 10 bp, Unknown
  misc_feature (1)..( 10): Result.005 file - promoters50/2724724
tatcacttgt

SEQ ID NO: 181009 - DNA, 10 bp, Unknown
  misc_feature (1)..( 10): Result.005 file - promoters50/2724724
gataacttga

SEQ ID NO: 181010 - DNA, 8 bp, Unknown
  misc_feature (1)..( 8): Result.005 file - promoters50/2724724
aaataaaa

SEQ ID NO: 181011 - DNA, 8 bp, Unknown
  misc_feature (1)..( 8): Result.005 file - promoters50/2724724
caataaaa

SEQ ID NO: 181012 - DNA, 8 bp, Unknown
  misc_feature (1)..( 8): Result.005 file - promoters50/2724724
aaacaaaa

SEQ ID NO: 181013 - DNA, 10 bp, Unknown
  misc_feature (1)..( 10): Result.005 file - promoters50/2724724
agcaaaaata

SEQ ID NO: 181014 - DNA, 10 bp, Unknown
  misc_feature (1)..( 10): Result.005 file - promoters50/2724724
aaagaaaata

SEQ ID NO: 181015 - DNA, 10 bp, Unknown
  misc_feature (1)..( 10): Result.005 file - promoters50/2724724
aaatgaaata

SEQ ID NO: 181016 - DNA, 8 bp, Unknown
  misc_feature (1)..( 8): Result.005 file - promoters50/2724724
accattaa

SEQ ID NO: 181017 - DNA, 8 bp, Unknown
  misc_feature (1)..( 8): Result.005 file - promoters50/2724724
cccactaa

SEQ ID NO: 181018 - DNA, 8 bp, Unknown
  misc_feature (1)..( 8): Result.005 file - promoters50/2724724
cccactag

SEQ ID NO: 181019 - DNA, 9 bp, Unknown
  misc_feature (1)..( 9): Result.005 file - promoters50/2724736
caatacaag

SEQ ID NO: 181020 - DNA, 9 bp, Unknown
  misc_feature (1)..( 9): Result.005 file - promoters50/2724736
aaatccaaa

SEQ ID NO: 181021 - DNA, 9 bp, Unknown
  misc_feature (1)..( 9): Result.005 file - promoters50/2724736
caatacaat

SEQ ID NO: 181022 - DNA, 9 bp, Unknown
  misc_feature (1)..( 9): Result.005 file - promoters50/2724736
gtatcaaaa

SEQ ID NO: 181023 - DNA, 9 bp, Unknown
  misc_feature (1)..( 9): Result.005 file - promoters50/2724736
agttacaat

SEQ ID NO: 181024 - DNA, 12 bp, Unknown
  misc_feature (1)..( 12): Result.005 file - promoters50/2724736
atccaattaaaa

SEQ ID NO: 181025 - DNA, 12 bp, Unknown
  misc_feature (1)..( 12): Result.005 file - promoters50/2724736
tttcaattaact

SEQ ID NO: 181026 - DNA, 12 bp, Unknown
  misc_feature (1)..( 12): Result.005 file - promoters50/2724736
taccatttatag

SEQ ID NO: 181027 - DNA, 12 bp, Unknown
  misc_feature (1)..( 12): Result.005 file - promoters50/2724736
gtctatttaaaa

SEQ ID NO: 181028 - DNA, 12 bp, Unknown
  misc_feature (1)..( 12): Result.005 file - promoters50/2724736
tacctttttctg

SEQ ID NO: 181029 - DNA, 7 bp, Unknown
  misc_feature (1)..( 7): Result.005 file - promoters50/2724756
tataaag

SEQ ID NO: 181030 - DNA, 7 bp, Unknown
  misc_feature (1)..( 7): Result.005 file - promoters50/2724756
tataaag

SEQ ID NO: 181031 - DNA, 7 bp, Unknown
  misc_feature (1)..( 7): Result.005 file - promoters50/2724756
tataaat

SEQ ID NO: 181032 - DNA, 7 bp, Unknown
  misc_feature (1)..( 7): Result.005 file - promoters50/2724756
aataaat

SEQ ID NO: 181033 - DNA, 7 bp, Unknown
  misc_feature (1)..( 7): Result.005 file - promoters50/2724756
aataaaa

SEQ ID NO: 181034 - DNA, 15 bp, Unknown
  misc_feature (1)..( 15): Result.005 file - promoters50/2724771
aatctaaaccataat

SEQ ID NO: 181035 - DNA, 15 bp, Unknown
  misc_feature (1)..( 15): Result.005 file - promoters50/2724771
aatataacccaaaat

SEQ ID NO: 181036 - DNA, 15 bp, Unknown
  misc_feature (1)..( 15): Result.005 file - promoters50/2724771
ttaaacatccaaaaa

SEQ ID NO: 181037 - DNA, 15 bp, Unknown
  misc_feature (1)..( 15): Result.005 file - promoters50/2724771
ctcacaaaccaatca

SEQ ID NO: 181038 - DNA, 8 bp, Unknown
  misc_feature (1)..( 8): Result.005 file - promoters50/2724771
agaaaatt

SEQ ID NO: 181039 - DNA, 8 bp, Unknown
  misc_feature (1)..( 8): Result.005 file - promoters50/2724771
ggaaaatc

SEQ ID NO: 181040 - DNA, 8 bp, Unknown
  misc_feature (1)..( 8): Result.005 file - promoters50/2724771
gtaaaatt

SEQ ID NO: 181041 - DNA, 8 bp, Unknown
  misc_feature (1)..( 8): Result.005 file - promoters50/2724771
agaaaact

SEQ ID NO: 181042 - DNA, 8 bp, Unknown
  misc_feature (1)..( 8): Result.005 file - promoters50/2781302
tttaagaa

SEQ ID NO: 181043 - DNA, 8 bp, Unknown
  misc_feature (1)..( 8): Result.005 file - promoters50/2781302
tttaagtt

SEQ ID NO: 181044 - DNA, 8 bp, Unknown
  misc_feature (1)..( 8): Result.005 file - promoters50/2781302
gttaggaa

SEQ ID NO: 181045 - DNA, 7 bp, Unknown
  misc_feature (1)..( 7): Result.005 file - promoters50/2781320
atattaa

SEQ ID NO: 181046 - DNA, 7 bp, Unknown
  misc_feature (1)..( 7): Result.005 file - promoters50/2781320
atactaa

SEQ ID NO: 181047 - DNA, 7 bp, Unknown
  misc_feature (1)..( 7): Result.005 file - promoters50/2781320
ttattaa

SEQ ID NO: 181048 - DNA, 11 bp, Unknown
  misc_feature (1)..( 11): Result.005 file - promoters50/2781320
tagcaatagtg

SEQ ID NO: 181049 - DNA, 11 bp, Unknown
  misc_feature (1)..( 11): Result.005 file - promoters50/2781320
ttacaagagtg

SEQ ID NO: 181050 - DNA, 11 bp, Unknown
  misc_feature (1)..( 11): Result.005 file - promoters50/2781320
tagcactagac

SEQ ID NO: 181051 - DNA, 7 bp, Unknown
  misc_feature (1)..( 7): Result.005 file - promoters50/2781320
aatctaa

SEQ ID NO: 181052 - DNA, 7 bp, Unknown
  misc_feature (1)..( 7): Result.005 file - promoters50/2781320
aatataa

SEQ ID NO: 181053 - DNA, 7 bp, Unknown
  misc_feature (1)..( 7): Result.005 file - promoters50/2781320
aatttaa

SEQ ID NO: 181054 - DNA, 10 bp, Unknown
  misc_feature (1)..( 10): Result.005 file - promoters50/2781320
attgaataaa

SEQ ID NO: 181055 - DNA, 10 bp, Unknown
  misc_feature (1)..( 10): Result.005 file - promoters50/2781320
taagaagaaa

SEQ ID NO: 181056 - DNA, 10 bp, Unknown
  misc_feature (1)..( 10): Result.005 file - promoters50/2781320
atttaatatc

SEQ ID NO: 181057 - DNA, 7 bp, Unknown
  misc_feature (1)..( 7): Result.005 file - promoters50/2781320
tatttca

SEQ ID NO: 181058 - DNA, 7 bp, Unknown
  misc_feature (1)..( 7): Result.005 file - promoters50/2781320
catttca

SEQ ID NO: 181059 - DNA, 7 bp, Unknown
  misc_feature (1)..( 7): Result.005 file - promoters50/2781320
catttct

SEQ ID NO: 181060 - DNA, 12 bp, Unknown
  misc_feature (1)..( 12): Result.005 file - promoters50/2781320
taatacatttat

SEQ ID NO: 181061 - DNA, 12 bp, Unknown
  misc_feature (1)..( 12): Result.005 file - promoters50/2781320
taataaattttg

SEQ ID NO: 181062 - DNA, 12 bp, Unknown
  misc_feature (1)..( 12): Result.005 file - promoters50/2781320
tgttaagttttg

SEQ ID NO: 181063 - DNA, 7 bp, Unknown
  misc_feature (1)..( 7): Result.005 file - promoters50/2781320
tttaccg

SEQ ID NO: 181064 - DNA, 7 bp, Unknown
  misc_feature (1)..( 7): Result.005 file - promoters50/2781320
tttacca

SEQ ID NO: 181065 - DNA, 7 bp, Unknown
  misc_feature (1)..( 7): Result.005 file - promoters50/2781320
ttaacat

SEQ ID NO: 181066 - DNA, 8 bp, Unknown
  misc_feature (1)..( 8): Result.005 file - promoters50/2781320
attttgaa

SEQ ID NO: 181067 - DNA, 8 bp, Unknown
  misc_feature (1)..( 8): Result.005 file - promoters50/2781320
ggtttgaa

SEQ ID NO: 181068 - DNA, 8 bp, Unknown
  misc_feature (1)..( 8): Result.005 file - promoters50/2781320
ggttagaa

SEQ ID NO: 181069 - DNA, 8 bp, Unknown
  misc_feature (1)..( 8): Result.005 file - promoters50/2781320
agttggaa

SEQ ID NO: 181070 - DNA, 8 bp, Unknown
  misc_feature (1)..( 8): Result.005 file - promoters50/2781320
ggttagaa

SEQ ID NO: 181071 - DNA, 8 bp, Unknown
  misc_feature (1)..( 8): Result.005 file - promoters50/2781320
ggtttgaa

SEQ ID NO: 181072 - DNA, 11 bp, Unknown
  misc_feature (1)..( 11): Result.005 file - promoters50/2781341
gcagttttttt

SEQ ID NO: 181073 - DNA, 11 bp, Unknown
  misc_feature (1)..( 11): Result.005 file - promoters50/2781341
gacgtttttgt

SEQ ID NO: 181074 - DNA, 11 bp, Unknown
  misc_feature (1)..( 11): Result.005 file - promoters50/2781341
aaagttttact

SEQ ID NO: 181075 - DNA, 11 bp, Unknown
  misc_feature (1)..( 11): Result.005 file - promoters50/2781341
acattttatgt

SEQ ID NO: 181076 - DNA, 11 bp, Unknown
  misc_feature (1)..( 11): Result.005 file - promoters50/2781341
atattttatga

SEQ ID NO: 181077 - DNA, 11 bp, Unknown
  misc_feature (1)..( 11): Result.005 file - promoters50/2781341
tatgtttctta

SEQ ID NO: 181078 - DNA, 11 bp, Unknown
  misc_feature (1)..( 11): Result.005 file - promoters50/2781341
aaaaattacgg

SEQ ID NO: 181079 - DNA, 11 bp, Unknown
  misc_feature (1)..( 11): Result.005 file - promoters50/2781341
aaatatttttt

SEQ ID NO: 181080 - DNA, 11 bp, Unknown
  misc_feature (1)..( 11): Result.005 file - promoters50/2781341
aaaaaaaaaaa

SEQ ID NO: 181081 - DNA, 11 bp, Unknown
  misc_feature (1)..( 11): Result.005 file - promoters50/2781341
ccatatttggg

SEQ ID NO: 181082 - DNA, 11 bp, Unknown
  misc_feature (1)..( 11): Result.005 file - promoters50/2781341
tttcatttttt

SEQ ID NO: 181083 - DNA, 11 bp, Unknown
  misc_feature (1)..( 11): Result.005 file - promoters50/2781341
aaaaatttatg

SEQ ID NO: 181084 - DNA, 11 bp, Unknown
  misc_feature (1)..( 11): Result.005 file - promoters50/2781341
accggtttttt

SEQ ID NO: 181085 - DNA, 11 bp, Unknown
  misc_feature (1)..( 11): Result.005 file - promoters50/2781341
tatttaagatt

SEQ ID NO: 181086 - DNA, 11 bp, Unknown
  misc_feature (1)..( 11): Result.005 file - promoters50/2781341
attttatgatt

SEQ ID NO: 181087 - DNA, 11 bp, Unknown
  misc_feature (1)..( 11): Result.005 file - promoters50/2781341
gatttctgacg

SEQ ID NO: 181088 - DNA, 11 bp, Unknown
  misc_feature (1)..( 11): Result.005 file - promoters50/2781341
tgtttcttacg

SEQ ID NO: 181089 - DNA, 11 bp, Unknown
  misc_feature (1)..( 11): Result.005 file - promoters50/2781341
gttttatcaaa

SEQ ID NO: 181090 - DNA, 11 bp, Unknown
  misc_feature (1)..( 11): Result.005 file - promoters50/2781341
attttatgttt

SEQ ID NO: 181091 - DNA, 15 bp, Unknown
  misc_feature (1)..( 15): Result.005 file - promoters50/2781341
tataaaaatttttct

SEQ ID NO: 181092 - DNA, 15 bp, Unknown
  misc_feature (1)..( 15): Result.005 file - promoters50/2781341
gacaatgattttttg

SEQ ID NO: 181093 - DNA, 15 bp, Unknown
  misc_feature (1)..( 15): Result.005 file - promoters50/2781341
gaacttaattttttt

SEQ ID NO: 181094 - DNA, 15 bp, Unknown
  misc_feature (1)..( 15): Result.005 file - promoters50/2781341
ctttgaaagttttcc

SEQ ID NO: 181095 - DNA, 15 bp, Unknown
  misc_feature (1)..( 15): Result.005 file - promoters50/2781341
aacttaaatttacgc

SEQ ID NO: 181096 - DNA, 16 bp, Unknown
  misc_feature (1)..( 16): Result.005 file - promoters50/2781341
aacttaattcttttta

SEQ ID NO: 181097 - DNA, 16 bp, Unknown
  misc_feature (1)..( 16): Result.005 file - promoters50/2781341
gtggcttgttttctac

SEQ ID NO: 181098 - DNA, 13 bp, Unknown
  misc_feature (1)..( 13): Result.005 file - promoters50/2781341
acttttaacaaaa

SEQ ID NO: 181099 - DNA, 13 bp, Unknown
  misc_feature (1)..( 13): Result.005 file - promoters50/2781341
cactctaaaaaaa

SEQ ID NO: 181100 - DNA, 12 bp, Unknown
  misc_feature (1)..( 12): Result.005 file - promoters50/2781341
ggttttacatga

SEQ ID NO: 181101 - DNA, 12 bp, Unknown
  misc_feature (1)..( 12): Result.005 file - promoters50/2781341
ctttttacagtt

SEQ ID NO: 181102 - DNA, 13 bp, Unknown
  misc_feature (1)..( 13): Result.005 file - promoters50/2781341
aattttaaaaaat

SEQ ID NO: 181103 - DNA, 12 bp, Unknown
  misc_feature (1)..( 12): Result.005 file - promoters50/2781341
ctcctaaaaacg

SEQ ID NO: 181104 - DNA, 13 bp, Unknown
  misc_feature (1)..( 13): Result.005 file - promoters50/2781341
gttttctacccat

SEQ ID NO: 181105 - DNA, 10 bp, Unknown
  misc_feature (1)..( 10): Result.005 file - promoters50/2781341
taaagtttgg

SEQ ID NO: 181106 - DNA, 10 bp, Unknown
  misc_feature (1)..( 10): Result.005 file - promoters50/2781341
acaagttttg

SEQ ID NO: 181107 - DNA, 10 bp, Unknown
  misc_feature (1)..( 10): Result.005 file - promoters50/2781341
aaaaatttat

SEQ ID NO: 181108 - DNA, 10 bp, Unknown
  misc_feature (1)..( 10): Result.005 file - promoters50/2781341
tgaaattttt

SEQ ID NO: 181109 - DNA, 10 bp, Unknown
  misc_feature (1)..( 10): Result.005 file - promoters50/2781341
acaggttttt

SEQ ID NO: 181110 - DNA, 10 bp, Unknown
  misc_feature (1)..( 10): Result.005 file - promoters50/2781341
tctcattttt

SEQ ID NO: 181111 - DNA, 14 bp, Unknown
  misc_feature (1)..( 14): Result.005 file - promoters50/2781341
taaaaatttttctg

SEQ ID NO: 181112 - DNA, 14 bp, Unknown
  misc_feature (1)..( 14): Result.005 file - promoters50/2781341
cttaaatttacgct

SEQ ID NO: 181113 - DNA, 15 bp, Unknown
  misc_feature (1)..( 15): Result.005 file - promoters50/2781341
ttgaaagttttccct

SEQ ID NO: 181114 - DNA, 15 bp, Unknown
  misc_feature (1)..( 15): Result.005 file - promoters50/2781341
aacttaatttttttt

SEQ ID NO: 181115 - DNA, 16 bp, Unknown
  misc_feature (1)..( 16): Result.005 file - promoters50/2781341
aacttaattcttttta

SEQ ID NO: 181116 - DNA, 16 bp, Unknown
  misc_feature (1)..( 16): Result.005 file - promoters50/2781341
gtggcttgttttctac

SEQ ID NO: 181117 - DNA, 13 bp, Unknown
  misc_feature (1)..( 13): Result.005 file - promoters50/2781786
atctgaaaattta

SEQ ID NO: 181118 - DNA, 13 bp, Unknown
  misc_feature (1)..( 13): Result.005 file - promoters50/2781786
aagtgaagattct

SEQ ID NO: 181119 - DNA, 13 bp, Unknown
  misc_feature (1)..( 13): Result.005 file - promoters50/2781786
gactgaaacttta

SEQ ID NO: 181120 - DNA, 13 bp, Unknown
  misc_feature (1)..( 13): Result.005 file - promoters50/2781786
aagtgaagacaaa

SEQ ID NO: 181121 - DNA, 13 bp, Unknown
  misc_feature (1)..( 13): Result.005 file - promoters50/2781786
aacgtaagcttca

SEQ ID NO: 181122 - DNA, 13 bp, Unknown
  misc_feature (1)..( 13): Result.005 file - promoters50/2781786
gacttaaaaaagc

SEQ ID NO: 181123 - DNA, 10 bp, Unknown
  misc_feature (1)..( 10): Result.005 file - promoters50/2781800
taagttaaga

SEQ ID NO: 181124 - DNA, 10 bp, Unknown
  misc_feature (1)..( 10): Result.005 file - promoters50/2781800
taaattaata

SEQ ID NO: 181125 - DNA, 10 bp, Unknown
  misc_feature (1)..( 10): Result.005 file - promoters50/2781800
taaatcaata

SEQ ID NO: 181126 - DNA, 10 bp, Unknown
  misc_feature (1)..( 10): Result.005 file - promoters50/2781800
ttaagttaag

SEQ ID NO: 181127 - DNA, 10 bp, Unknown
  misc_feature (1)..( 10): Result.005 file - promoters50/2781800
ttaatttata

SEQ ID NO: 181128 - DNA, 10 bp, Unknown
  misc_feature (1)..( 10): Result.005 file - promoters50/2781800
tcaatatata

SEQ ID NO: 181129 - DNA, 8 bp, Unknown
  misc_feature (1)..( 8): Result.005 file - promoters50/2781800
tgtttata

SEQ ID NO: 181130 - DNA, 8 bp, Unknown
  misc_feature (1)..( 8): Result.005 file - promoters50/2781800
aatttata

SEQ ID NO: 181131 - DNA, 8 bp, Unknown
  misc_feature (1)..( 8): Result.005 file - promoters50/2781800
aatatata

SEQ ID NO: 181132 - DNA, 8 bp, Unknown
  misc_feature (1)..( 8): Result.005 file - promoters50/2781800
atttgatg

SEQ ID NO: 181133 - DNA, 8 bp, Unknown
  misc_feature (1)..( 8): Result.005 file - promoters50/2781800
ttttcatg

SEQ ID NO: 181134 - DNA, 8 bp, Unknown
  misc_feature (1)..( 8): Result.005 file - promoters50/2781800
ttttcact

SEQ ID NO: 181135 - DNA, 8 bp, Unknown
  misc_feature (1)..( 8): Result.005 file - promoters50/2781800
agtataaa

SEQ ID NO: 181136 - DNA, 8 bp, Unknown
  misc_feature (1)..( 8): Result.005 file - promoters50/2781800
tatataaa

SEQ ID NO: 181137 - DNA, 8 bp, Unknown
  misc_feature (1)..( 8): Result.005 file - promoters50/2781800
tatataat

SEQ ID NO: 181138 - DNA, 38 bp, Unknown
  misc_feature (1)..( 38): Result.005 file - promoters50/2781800
gttggtaaaaccattatatgcattttgtcaaacctatc

SEQ ID NO: 181139 - DNA, 38 bp, Unknown
  misc_feature (1)..( 38): Result.005 file - promoters50/2781800
atgataatttaaaatttaggcattttttaaggtttagg

SEQ ID NO: 181140 - DNA, 38 bp, Unknown
  misc_feature (1)..( 38): Result.005 file - promoters50/2781800
ttaataacgtggtccggaattattttatcaaataaaga

SEQ ID NO: 181141 - DNA, 39 bp, Unknown; identical to SEQ ID NO: 90981
  misc_feature (1)..( 39): Result.005 file - promoters50/2781800

SEQ ID NO: 181142 - DNA, 39 bp, Unknown
  misc_feature (1)..( 39): Result.005 file - promoters50/2781800
aataacaaacaaaatacattgtatgataagaacttggac

SEQ ID NO: 181143 - DNA, 39 bp, Unknown
  misc_feature (1)..( 39): Result.005 file - promoters50/2781800
taaagaaaataaatttctatgacccaataatgtaatgct

SEQ ID NO: 181144 - DNA, 39 bp, Unknown; identical to SEQ ID NO: 90981
  misc_feature (1)..( 39): Result.005 file - promoters50/2781800

SEQ ID NO: 181145 - DNA, 8 bp, Unknown
  misc_feature (1)..( 8): Result.005 file - promoters50/2781800
ttatcaat

SEQ ID NO: 181146 - DNA, 8 bp, Unknown
  misc_feature (1)..( 8): Result.005 file - promoters50/2781800
taatcaat

SEQ ID NO: 181147 - DNA, 8 bp, Unknown
  misc_feature (1)..( 8): Result.005 file - promoters50/2781800
ttaccaat

SEQ ID NO: 181148 - DNA, 10 bp, Unknown
  misc_feature (1)..( 10): Result.005 file - promoters50/2781818
gagaggcttg

SEQ ID NO: 181149 - DNA, 10 bp, Unknown
  misc_feature (1)..( 10): Result.005 file - promoters50/2781818
aagaggattg

SEQ ID NO: 181150 - DNA, 10 bp, Unknown
  misc_feature (1)..( 10): Result.005 file - promoters50/2781818
aagatgatgt

SEQ ID NO: 181151 - DNA, 9 bp, Unknown
  misc_feature (1)..( 9): Result.005 file - promoters50/2781818
aaaaagagt

SEQ ID NO: 181152 - DNA, 9 bp, Unknown
  misc_feature (1)..( 9): Result.005 file - promoters50/2781818
aaaaaggcc

SEQ ID NO: 181153 - DNA, 9 bp, Unknown
  misc_feature (1)..( 9): Result.005 file - promoters50/2781818
ttaaaggag

SEQ ID NO: 181154 - DNA, 16 bp, Unknown
  misc_feature (1)..( 16): Result.005 file - promoters50/2781998
agtaggaaaagataca

SEQ ID NO: 181155 - DNA, 16 bp, Unknown
  misc_feature (1)..( 16): Result.005 file - promoters50/2781998
acgtggaaaaacaaaa

SEQ ID NO: 181156 - DNA, 16 bp, Unknown
  misc_feature (1)..( 16): Result.005 file - promoters50/2781998
agttggagaagttttg

SEQ ID NO: 181157 - DNA, 16 bp, Unknown
  misc_feature (1)..( 16): Result.005 file - promoters50/2781998
aagaaatgaagggttg

SEQ ID NO: 181158 - DNA, 12 bp, Unknown
  misc_feature (1)..( 12): Result.005 file - promoters50/2785775
tgggaaactttt

SEQ ID NO: 181159 - DNA, 12 bp, Unknown
  misc_feature (1)..( 12): Result.005 file - promoters50/2785775
tgggaaaaaatc

SEQ ID NO: 181160 - DNA, 12 bp, Unknown
  misc_feature (1)..( 12): Result.005 file - promoters50/2785775
cgggaagcttgt

SEQ ID NO: 181161 - DNA, 12 bp, Unknown
  misc_feature (1)..( 12): Result.005 file - promoters50/2785775
tttgaagtttgt

SEQ ID NO: 181162 - DNA, 11 bp, Unknown
  misc_feature (1)..( 11): Result.005 file - promoters50/2785798
actgactatta

SEQ ID NO: 181163 - DNA, 11 bp, Unknown
  misc_feature (1)..( 11): Result.005 file - promoters50/2785798
gttgacaattt

SEQ ID NO: 181164 - DNA, 11 bp, Unknown
  misc_feature (1)..( 11): Result.005 file - promoters50/2785798
agctactctta

SEQ ID NO: 181165 - DNA, 11 bp, Unknown
  misc_feature (1)..( 11): Result.005 file - promoters50/2785798
aatgaaaatta

SEQ ID NO: 181166 - DNA, 11 bp, Unknown
  misc_feature (1)..( 11): Result.005 file - promoters50/2785798
gttgacataaa

SEQ ID NO: 181167 - DNA, 11 bp, Unknown
  misc_feature (1)..( 11): Result.005 file - promoters50/2785798
tatgcaaatct

SEQ ID NO: 181168 - DNA, 9 bp, Unknown
  misc_feature (1)..( 9): Result.005 file - promoters50/2785798
aatatcttg

SEQ ID NO: 181169 - DNA, 9 bp, Unknown
  misc_feature (1)..( 9): Result.005 file - promoters50/2785798
aatattttg

SEQ ID NO: 181170 - DNA, 9 bp, Unknown
  misc_feature (1)..( 9): Result.005 file - promoters50/2785798
aatatttta

SEQ ID NO: 181171 - DNA, 9 bp, Unknown
  misc_feature (1)..( 9): Result.005 file - promoters50/2785798
tatatttac

SEQ ID NO: 181172 - DNA, 9 bp, Unknown
  misc_feature (1)..( 9): Result.005 file - promoters50/2785798
gttattttt

SEQ ID NO: 181173 - DNA, 9 bp, Unknown
  misc_feature (1)..( 9): Result.005 file - promoters50/2785798
tttattttt

SEQ ID NO: 181174 - DNA, 12 bp, Unknown
  misc_feature (1)..( 12): Result.005 file - promoters50/2785798
aatattttagtt

SEQ ID NO: 181175 - DNA, 12 bp, Unknown
  misc_feature (1)..( 12): Result.005 file - promoters50/2785798
tttatttttgtt

SEQ ID NO: 181176 - DNA, 12 bp, Unknown
  misc_feature (1)..( 12): Result.005 file - promoters50/2785798
aatattttgcca

SEQ ID NO: 181177 - DNA, 12 bp, Unknown
  misc_feature (1)..( 12): Result.005 file - promoters50/2785798
tatatttacaca

SEQ ID NO: 181178 - DNA, 12 bp, Unknown
  misc_feature (1)..( 12): Result.005 file - promoters50/2785798
gttattttttac

SEQ ID NO: 181179 - DNA, 12 bp, Unknown
  misc_feature (1)..( 12): Result.005 file - promoters50/2785798
cttaatttaagg

SEQ ID NO: 181180 - DNA, 7 bp, Unknown
  misc_feature (1)..( 7): Result.005 file - promoters50/2918398
tataaaa

SEQ ID NO: 181181 - DNA, 7 bp, Unknown
  misc_feature (1)..( 7): Result.005 file - promoters50/2918398
tataaaa

SEQ ID NO: 181182 - DNA, 7 bp, Unknown
  misc_feature (1)..( 7): Result.005 file - promoters50/2918398
gataaaa

SEQ ID NO: 181183 - DNA, 7 bp, Unknown
  misc_feature (1)..( 7): Result.005 file - promoters50/2918607
tttgttt

SEQ ID NO: 181184 - DNA, 7 bp, Unknown
  misc_feature (1)..( 7): Result.005 file - promoters50/2918607
tttattt

SEQ ID NO: 181185 - DNA, 7 bp, Unknown
  misc_feature (1)..( 7): Result.005 file - promoters50/2918607
tttattt

SEQ ID NO: 181186 - DNA, 8 bp, Unknown
  misc_feature (1)..( 8): Result.005 file - promoters50/2918607
ttttagtt

SEQ ID NO: 181187 - DNA, 8 bp, Unknown
  misc_feature (1)..( 8): Result.005 file - promoters50/2918607
tttttgtt

SEQ ID NO: 181188 - DNA, 8 bp, Unknown
  misc_feature (1)..( 8): Result.005 file - promoters50/2918607
ggtttgtt

SEQ ID NO: 181189 - DNA, 7 bp, Unknown
  misc_feature (1)..( 7): Result.005 file - promoters50/2918607
taaaaaa

SEQ ID NO: 181190 - DNA, 7 bp, Unknown
  misc_feature (1)..( 7): Result.005 file - promoters50/2918607
caaaaaa

SEQ ID NO: 181191 - DNA, 7 bp, Unknown
  misc_feature (1)..( 7): Result.005 file - promoters50/2918607
caataaa

SEQ ID NO: 181192 - DNA, 8 bp, Unknown
  misc_feature (1)..( 8): Result.005 file - promoters50/2918607
caattact

SEQ ID NO: 181193 - DNA, 8 bp, Unknown
  misc_feature (1)..( 8): Result.005 file - promoters50/2918607
caataact

SEQ ID NO: 181194 - DNA, 8 bp, Unknown
  misc_feature (1)..( 8): Result.005 file - promoters50/2918607
ttataact

SEQ ID NO: 181195 - DNA, 8 bp, Unknown
  misc_feature (1)..( 8): Result.005 file - promoters50/2918611
actaataa

SEQ ID NO: 181196 - DNA, 7 bp, Unknown
  misc_feature (1)..( 7): Result.005 file - promoters50/2918611
ataataa

SEQ ID NO: 181197 - DNA, 8 bp, Unknown
  misc_feature (1)..( 8): Result.005 file - promoters50/2918611
aattatac

SEQ ID NO: 181198 - DNA, 7 bp, Unknown
  misc_feature (1)..( 7): Result.005 file - promoters50/2918611
aatgata

SEQ ID NO: 181199 - DNA, 7 bp, Unknown
  misc_feature (1)..( 7): Result.005 file - promoters50/2918611
aataata

SEQ ID NO: 181200 - DNA, 7 bp, Unknown
  misc_feature (1)..( 7): Result.005 file - promoters50/2918611
aattata

SEQ ID NO: 181201 - DNA, 8 bp, Unknown
  misc_feature (1)..( 8): Result.005 file - promoters50/2918611
tatagtgg

SEQ ID NO: 181202 - DNA, 8 bp, Unknown
  misc_feature (1)..( 8): Result.005 file - promoters50/2918611
gataatgg

SEQ ID NO: 181203 - DNA, 8 bp, Unknown
  misc_feature (1)..( 8): Result.005 file - promoters50/2918611
aatagtaa

SEQ ID NO: 181204 - DNA, 11 bp, Unknown
  misc_feature (1)..( 11): Result.005 file - promoters50/2918619
cgttaaataga

SEQ ID NO: 181205 - DNA, 11 bp, Unknown
  misc_feature (1)..( 11): Result.005 file - promoters50/2918619
tagtaaaaaga

SEQ ID NO: 181206 - DNA, 11 bp, Unknown
  misc_feature (1)..( 11): Result.005 file - promoters50/2918619
cgttatatact

SEQ ID NO: 181207 - DNA, 7 bp, Unknown
  misc_feature (1)..( 7): Result.005 file - promoters50/2918626
gttgaga

SEQ ID NO: 181208 - DNA, 7 bp, Unknown
  misc_feature (1)..( 7): Result.005 file - promoters50/2918626
gtttaga

SEQ ID NO: 181209 - DNA, 7 bp, Unknown
  misc_feature (1)..( 7): Result.005 file - promoters50/2918626
ttttaga

SEQ ID NO: 181210 - DNA, 8 bp, Unknown
  misc_feature (1)..( 8): Result.005 file - promoters50/2918636
taatattg

SEQ ID NO: 181211 - DNA, 8 bp, Unknown
  misc_feature (1)..( 8): Result.005 file - promoters50/2918636
aaattttg

SEQ ID NO: 181212 - DNA, 8 bp, Unknown
  misc_feature (1)..( 8): Result.005 file - promoters50/2918636
taagtttg

SEQ ID NO: 181213 - DNA, 8 bp, Unknown
  misc_feature (1)..( 8): Result.005 file - promoters50/2918636
gattattc

SEQ ID NO: 181214 - DNA, 8 bp, Unknown
  misc_feature (1)..( 8): Result.005 file - promoters50/2918636
gatttttc

SEQ ID NO: 181215 - DNA, 8 bp, Unknown
  misc_feature (1)..( 8): Result.005 file - promoters50/2918636
tattatta

SEQ ID NO: 181216 - DNA, 9 bp, Unknown
  misc_feature (1)..( 9): Result.005 file - promoters50/2918640
ctaaacaac

SEQ ID NO: 181217 - DNA, 9 bp, Unknown
  misc_feature (1)..( 9): Result.005 file - promoters50/2918640
ccaaacaat

SEQ ID NO: 181218 - DNA, 9 bp, Unknown
  misc_feature (1)..( 9): Result.005 file - promoters50/2918640
taaaaaaac

SEQ ID NO: 181219 - DNA, 9 bp, Unknown
  misc_feature (1)..( 9): Result.005 file - promoters50/2918640
tttaaaaac

SEQ ID NO: 181220 - DNA, 9 bp, Unknown
  misc_feature (1)..( 9): Result.005 file - promoters50/2918640
ctaagaaat

SEQ ID NO: 181221 - DNA, 9 bp, Unknown
  misc_feature (1)..( 9): Result.005 file - promoters50/2918640
ataataaat

SEQ ID NO: 181222 - DNA, 11 bp, Unknown
  misc_feature (1)..( 11): Result.005 file - promoters50/2918658
aaggtatcaaa

SEQ ID NO: 181223 - DNA, 11 bp, Unknown
  misc_feature (1)..( 11): Result.005 file - promoters50/2918658
acattataaaa

SEQ ID NO: 181224 - DNA, 11 bp, Unknown
  misc_feature (1)..( 11): Result.005 file - promoters50/2918658
cagggatcaca

SEQ ID NO: 181225 - DNA, 11 bp, Unknown
  misc_feature (1)..( 11): Result.005 file - promoters50/2918658
cctttattaaa

SEQ ID NO: 181226 - DNA, 11 bp, Unknown
  misc_feature (1)..( 11): Result.005 file - promoters50/2918658
tttttataatc

SEQ ID NO: 181227 - DNA, 11 bp, Unknown
  misc_feature (1)..( 11): Result.005 file - promoters50/2918658
attttagaaaa

SEQ ID NO: 181228 - DNA, 11 bp, Unknown
  misc_feature (1)..( 11): Result.005 file - promoters50/2918658
acattaaaaaa

SEQ ID NO: 181229 - DNA, 7 bp, Unknown
  misc_feature (1)..( 7): Result.005 file - promoters50/2918666
gtaagaa

SEQ ID NO: 181230 - DNA, 7 bp, Unknown
  misc_feature (1)..( 7): Result.005 file - promoters50/2918666
gtaagaa

SEQ ID NO: 181231 - DNA, 7 bp, Unknown
  misc_feature (1)..( 7): Result.005 file - promoters50/2918666
gtaagat

SEQ ID NO: 181232 - DNA, 13 bp, Unknown
  misc_feature (1)..( 13): Result.005 file - promoters50/2918666
agacataataaat

SEQ ID NO: 181233 - DNA, 13 bp, Unknown
  misc_feature (1)..( 13): Result.005 file - promoters50/2918666
atttataataaaa

SEQ ID NO: 181234 - DNA, 13 bp, Unknown
  misc_feature (1)..( 13): Result.005 file - promoters50/2918666
gagtggaatcaat

SEQ ID NO: 181235 - DNA, 13 bp, Unknown
  misc_feature (1)..( 13): Result.005 file - promoters50/2918666
agacaaaataaaa

SEQ ID NO: 181236 - DNA, 8 bp, Unknown
  misc_feature (1)..( 8): Result.005 file - promoters50/2918666
tatataat

SEQ ID NO: 181237 - DNA, 8 bp, Unknown
  misc_feature (1)..( 8): Result.005 file - promoters50/2918666
catataat

SEQ ID NO: 181238 - DNA, 8 bp, Unknown
  misc_feature (1)..( 8): Result.005 file - promoters50/2918666
catataac

SEQ ID NO: 181239 - DNA, 9 bp, Unknown
  misc_feature (1)..( 9): Result.005 file - promoters50/2918666
tatcacaat

SEQ ID NO: 181240 - DNA, 13 bp, Unknown
  misc_feature (1)..( 13): Result.005 file - promoters50/2918666
gtagaaattaata

SEQ ID NO: 181241 - DNA, 13 bp, Unknown
  misc_feature (1)..( 13): Result.005 file - promoters50/2918666
tataaaatcaata

SEQ ID NO: 181242 - DNA, 13 bp, Unknown
  misc_feature (1)..( 13): Result.005 file - promoters50/2918666
gtataaatttact

SEQ ID NO: 181243 - DNA, 8 bp, Unknown
  misc_feature (1)..( 8): Result.005 file - promoters50/2918666
tagacacg

SEQ ID NO: 181244 - DNA, 8 bp, Unknown
  misc_feature (1)..( 8): Result.005 file - promoters50/2918666
aagagacg

SEQ ID NO: 181245 - DNA, 8 bp, Unknown
  misc_feature (1)..( 8): Result.005 file - promoters50/2918666
aagagaag

SEQ ID NO: 181246 - DNA, 8 bp, Unknown
  misc_feature (1)..( 8): Result.005 file - promoters50/2918666
gctaatga

SEQ ID NO: 181247 - DNA, 8 bp, Unknown
  misc_feature (1)..( 8): Result.005 file - promoters50/2918666
gctgatgt

SEQ ID NO: 181248 - DNA, 8 bp, Unknown
  misc_feature (1)..( 8): Result.005 file - promoters50/2918666
aataatga

SEQ ID NO: 181249 - DNA, 8 bp, Unknown
  misc_feature (1)..( 8): Result.005 file - promoters50/2918666
tgggaagt

SEQ ID NO: 181250 - DNA, 8 bp, Unknown
  misc_feature (1)..( 8): Result.005 file - promoters50/2918666
tggtaaga

SEQ ID NO: 181251 - DNA, 8 bp, Unknown
  misc_feature (1)..( 8): Result.005 file - promoters50/2918666
aagtaaga

SEQ ID NO: 181252 - DNA, 8 bp, Unknown
  misc_feature (1)..( 8): Result.005 file - promoters50/2918666
tattaatt

SEQ ID NO: 181253 - DNA, 8 bp, Unknown
  misc_feature (1)..( 8): Result.005 file - promoters50/2918666
gattgatt

SEQ ID NO: 181254 - DNA, 8 bp, Unknown
  misc_feature (1)..( 8): Result.005 file - promoters50/2918666
tataaatt

SEQ ID NO: 181255 - DNA, 8 bp, Unknown
  misc_feature (1)..( 8): Result.005 file - promoters50/2918666
tattgatc

SEQ ID NO: 181256 - DNA, 7 bp, Unknown
  misc_feature (1)..( 7): Result.005 file - promoters50/2918666
aataaat

SEQ ID NO: 181257 - DNA, 7 bp, Unknown
  misc_feature (1)..( 7): Result.005 file - promoters50/2918666
tataaat

SEQ ID NO: 181258 - DNA, 7 bp, Unknown
  misc_feature (1)..( 7): Result.005 file - promoters50/2918666
tataaaa

SEQ ID NO: 181259 - DNA, 9 bp, Unknown
  misc_feature (1)..( 9): Result.005 file - promoters50/2918666
tctttttcc

SEQ ID NO: 181260 - DNA, 9 bp, Unknown
  misc_feature (1)..( 9): Result.005 file - promoters50/2918666
acttttttc

SEQ ID NO: 181261 - DNA, 9 bp, Unknown
  misc_feature (1)..( 9): Result.005 file - promoters50/2918666
tcttcttcc

SEQ ID NO: 181262 - DNA, 8 bp, Unknown
  misc_feature (1)..( 8): Result.005 file - promoters50/2918666
agtgaaac

SEQ ID NO: 181263 - DNA, 8 bp, Unknown
  misc_feature (1)..( 8): Result.005 file - promoters50/2918666
agtgaaaa

SEQ ID NO: 181264 - DNA, 8 bp, Unknown
  misc_feature (1)..( 8): Result.005 file - promoters50/2918666
tctgaaaa

SEQ ID NO: 181265 - DNA, 8 bp, Unknown
  misc_feature (1)..( 8): Result.005 file - promoters50/2918666
caatcttg

SEQ ID NO: 181266 - DNA, 8 bp, Unknown
  misc_feature (1)..( 8): Result.005 file - promoters50/2918666
aaatcttg

SEQ ID NO: 181267 - DNA, 8 bp, Unknown
  misc_feature (1)..( 8): Result.005 file - promoters50/2918666
aaagcttc

SEQ ID NO: 181268 - DNA, 9 bp, Unknown
  misc_feature (1)..( 9): Result.005 file - promoters50/2918666
tatctcaaa

SEQ ID NO: 181269 - DNA, 9 bp, Unknown
  misc_feature (1)..( 9): Result.005 file - promoters50/2918666
tatcacaat

SEQ ID NO: 181270 - DNA, 9 bp, Unknown
  misc_feature (1)..( 9): Result.005 file - promoters50/2918666
tataacaat

SEQ ID NO: 181271 - DNA, 11 bp, Unknown
  misc_feature (1)..( 11): Result.005 file - promoters50/2918674
tgatcacttca

SEQ ID NO: 181272 - DNA, 11 bp, Unknown
  misc_feature (1)..( 11): Result.005 file - promoters50/2918674
gcttcatttca

SEQ ID NO: 181273 - DNA, 11 bp, Unknown
  misc_feature (1)..( 11): Result.005 file - promoters50/2918674
gtttcaattcc

SEQ ID NO: 181274 - DNA, 11 bp, Unknown
  misc_feature (1)..( 11): Result.005 file - promoters50/2918674
tgctcattttc

SEQ ID NO: 181275 - DNA, 11 bp, Unknown
  misc_feature (1)..( 11): Result.005 file - promoters50/2918674
gcttcatttct

SEQ ID NO: 181276 - DNA, 11 bp, Unknown
  misc_feature (1)..( 11): Result.005 file - promoters50/2918674
tcttgattaca

SEQ ID NO: 181277 - DNA, 10 bp, Unknown
  misc_feature (1)..( 10): Result.005 file - promoters50/2918674
gattgtgttc

SEQ ID NO: 181278 - DNA, 10 bp, Unknown
  misc_feature (1)..( 10): Result.005 file - promoters50/2918674
tattttgtat

SEQ ID NO: 181279 - DNA, 10 bp, Unknown
  misc_feature (1)..( 10): Result.005 file - promoters50/2918674
atatttctat

SEQ ID NO: 181280 - DNA, 10 bp, Unknown
  misc_feature (1)..( 10): Result.005 file - promoters50/2918674
acgtttgtat

SEQ ID NO: 181281 - DNA, 10 bp, Unknown
  misc_feature (1)..( 10): Result.005 file - promoters50/2918674
cggtttgtag

SEQ ID NO: 181282 - DNA, 10 bp, Unknown
  misc_feature (1)..( 10): Result.005 file - promoters50/2918674
tattttggtt

SEQ ID NO: 181283 - DNA, 9 bp, Unknown
  misc_feature (1)..( 9): Result.005 file - promoters50/2918676
gaaaaaaga

SEQ ID NO: 181284 - DNA, 9 bp, Unknown
  misc_feature (1)..( 9): Result.005 file - promoters50/2918676
gaacaaacg

SEQ ID NO: 181285 - DNA, 9 bp, Unknown
  misc_feature (1)..( 9): Result.005 file - promoters50/2918676
gaaagaaga

SEQ ID NO: 181286 - DNA, 11 bp, Unknown
  misc_feature (1)..( 11): Result.005 file - promoters50/2918676
taaaagtctac

SEQ ID NO: 181287 - DNA, 11 bp, Unknown
  misc_feature (1)..( 11): Result.005 file - promoters50/2918676
taaaagtctgt

SEQ ID NO: 181288 - DNA, 11 bp, Unknown
  misc_feature (1)..( 11): Result.005 file - promoters50/2918676
ctgcagtatgt

SEQ ID NO: 181289 - DNA, 7 bp, Unknown
  misc_feature (1)..( 7): Result.005 file - promoters50/2918676
aaaagaa

SEQ ID NO: 181290 - DNA, 7 bp, Unknown
  misc_feature (1)..( 7): Result.005 file - promoters50/2918676
gaaagaa

SEQ ID NO: 181291 - DNA, 7 bp, Unknown
  misc_feature (1)..( 7): Result.005 file - promoters50/2918676
gaaggaa

SEQ ID NO: 181292 - DNA, 8 bp, Unknown
  misc_feature (1)..( 8): Result.005 file - promoters50/2918688
aatggaat

SEQ ID NO: 181293 - DNA, 8 bp, Unknown
  misc_feature (1)..( 8): Result.005 file - promoters50/2918688
attggaat

SEQ ID NO: 181294 - DNA, 8 bp, Unknown
  misc_feature (1)..( 8): Result.005 file - promoters50/2918688
attggaaa

SEQ ID NO: 181295 - DNA, 10 bp, Unknown
  misc_feature (1)..( 10): Result.005 file - promoters50/2918688
caaacagctt

SEQ ID NO: 181296 - DNA, 10 bp, Unknown
  misc_feature (1)..( 10): Result.005 file - promoters50/2918688
caaacaacta

SEQ ID NO: 181297 - DNA, 10 bp, Unknown
  misc_feature (1)..( 10): Result.005 file - promoters50/2918688
taaacatcta

SEQ ID NO: 181298 - DNA, 8 bp, Unknown
  misc_feature (1)..( 8): Result.005 file - promoters50/2989987
gatccttt

SEQ ID NO: 181299 - DNA, 8 bp, Unknown
  misc_feature (1)..( 8): Result.005 file - promoters50/2989987
tatcattt

SEQ ID NO: 181300 - DNA, 8 bp, Unknown
  misc_feature (1)..( 8): Result.005 file - promoters50/2989987
tatcatat

SEQ ID NO: 181301 - DNA, 17 bp, Unknown
  misc_feature (1)..( 17): Result.005 file - promoters50/2989991
aaatcatctcaatgcca

SEQ ID NO: 181302 - DNA, 17 bp, Unknown
  misc_feature (1)..( 17): Result.005 file - promoters50/2989991
aaatcatctcaatgcca

SEQ ID NO: 181303 - DNA, 17 bp, Unknown
  misc_feature (1)..( 17): Result.005 file - promoters50/2989991
gaatgtaatcagtgcca

SEQ ID NO: 181304 - DNA, 9 bp, Unknown
  misc_feature (1)..( 9): Result.005 file - promoters50/2989991
attgatgaa

SEQ ID NO: 181305 - DNA, 9 bp, Unknown
  misc_feature (1)..( 9): Result.005 file - promoters50/2989991
gatgaagaa

SEQ ID NO: 181306 - DNA, 9 bp, Unknown
  misc_feature (1)..( 9): Result.005 file - promoters50/2989991
gatgcagat

SEQ ID NO: 181307 - DNA, 9 bp, Unknown
  misc_feature (1)..( 9): Result.005 file - promoters50/2989991
aagctcgat

SEQ ID NO: 181308 - DNA, 9 bp, Unknown
  misc_feature (1)..( 9): Result.005 file - promoters50/2989991
aaggtcgat

SEQ ID NO: 181309 - DNA, 9 bp, Unknown
  misc_feature (1)..( 9): Result.005 file - promoters50/2989991
aagctcgat

SEQ ID NO: 181310 - DNA, 9 bp, Unknown
  misc_feature (1)..( 9): Result.005 file - promoters50/2989991
cccgtcgat

SEQ ID NO: 181311 - DNA, 6 bp, Unknown
  misc_feature (1)..( 6): Result.005 file - promoters50/2989991
aaaaaa

SEQ ID NO: 181312 - DNA, 6 bp, Unknown
  misc_feature (1)..( 6): Result.005 file - promoters50/2989991
aaaaaa

SEQ ID NO: 181313 - DNA, 6 bp, Unknown
  misc_feature (1)..( 6): Result.005 file - promoters50/2989991
aaaaaa

SEQ ID NO: 181314 - DNA, 6 bp, Unknown
  misc_feature (1)..( 6): Result.005 file - promoters50/2989991
aacaag

SEQ ID NO: 181315 - DNA, 6 bp, Unknown
  misc_feature (1)..( 6): Result.005 file - promoters50/2989991
aacaag

SEQ ID NO: 181316 - DNA, 6 bp, Unknown
  misc_feature (1)..( 6): Result.005 file - promoters50/2989991
aacaag

SEQ ID NO: 181317 - DNA, 6 bp, Unknown
  misc_feature (1)..( 6): Result.005 file - promoters50/2989991
ttaaaa

SEQ ID NO: 181318 - DNA, 6 bp, Unknown
  misc_feature (1)..( 6): Result.005 file - promoters50/2989991
ttaaaa

SEQ ID NO: 181319 - DNA, 6 bp, Unknown
  misc_feature (1)..( 6): Result.005 file - promoters50/2989991
ttaaaa

SEQ ID NO: 181320 - DNA, 8 bp, Unknown
  misc_feature (1)..( 8): Result.005 file - promoters50/2989991
agatttat

SEQ ID NO: 181321 - DNA, 8 bp, Unknown
  misc_feature (1)..( 8): Result.005 file - promoters50/2989991
taatttat

SEQ ID NO: 181322 - DNA, 8 bp, Unknown
  misc_feature (1)..( 8): Result.005 file - promoters50/2989991
taatttaa

SEQ ID NO: 181323 - DNA, 8 bp, Unknown
  misc_feature (1)..( 8): Result.005 file - promoters50/2989991
ttcgaatt

SEQ ID NO: 181324 - DNA, 8 bp, Unknown
  misc_feature (1)..( 8): Result.005 file - promoters50/2989991
atcgtatt

SEQ ID NO: 181325 - DNA, 8 bp, Unknown
  misc_feature (1)..( 8): Result.005 file - promoters50/2989991
ttcgaaat

SEQ ID NO: 181326 - DNA, 8 bp, Unknown
  misc_feature (1)..( 8): Result.005 file - promoters50/2989991
aagaaaaa

SEQ ID NO: 181327 - DNA, 8 bp, Unknown
  misc_feature (1)..( 8): Result.005 file - promoters50/2989991
gggaaaaa

SEQ ID NO: 181328 - DNA, 8 bp, Unknown
  misc_feature (1)..( 8): Result.005 file - promoters50/2989991
aagtaaac

SEQ ID NO: 181329 - DNA, 8 bp, Unknown
  misc_feature (1)..( 8): Result.005 file - promoters50/2990064
aatttatt

SEQ ID NO: 181330 - DNA, 8 bp, Unknown
  misc_feature (1)..( 8): Result.005 file - promoters50/2990064
aatctatt

SEQ ID NO: 181331 - DNA, 8 bp, Unknown
  misc_feature (1)..( 8): Result.005 file - promoters50/2990064
cattaatt

SEQ ID NO: 181332 - DNA, 10 bp, Unknown
  misc_feature (1)..( 10): Result.005 file - promoters50/2990064
tgcttcaaca

SEQ ID NO: 181333 - DNA, 10 bp, Unknown
  misc_feature (1)..( 10): Result.005 file - promoters50/2990064
tgcatcaaca

SEQ ID NO: 181334 - DNA, 10 bp, Unknown
  misc_feature (1)..( 10): Result.005 file - promoters50/2990064
agtatcaaca

SEQ ID NO: 181335 - DNA, 10 bp, Unknown
  misc_feature (1)..( 10): Result.005 file - promoters50/2990064
aacatcaaag

SEQ ID NO: 181336 - DNA, 11 bp, Unknown
  misc_feature (1)..( 11): Result.005 file - promoters50/2990064
taatctctgca

SEQ ID NO: 181337 - DNA, 11 bp, Unknown
  misc_feature (1)..( 11): Result.005 file - promoters50/2990064
taatgtctcag

SEQ ID NO: 181338 - DNA, 11 bp, Unknown
  misc_feature (1)..( 11): Result.005 file - promoters50/2990064
taatgtctcag

SEQ ID NO: 181339 - DNA, 11 bp, Unknown
  misc_feature (1)..( 11): Result.005 file - promoters50/2990064
ctttgtatcag

SEQ ID NO: 181340 - DNA, 9 bp, Unknown
  misc_feature (1)..( 9): Result.005 file - promoters50/2990064
ttctatata

SEQ ID NO: 181341 - DNA, 9 bp, Unknown
  misc_feature (1)..( 9): Result.005 file - promoters50/2990064
ttctatata

SEQ ID NO: 181342 - DNA, 9 bp, Unknown
  misc_feature (1)..( 9): Result.005 file - promoters50/2990064
ttctatata

SEQ ID NO: 181343 - DNA, 9 bp, Unknown
  misc_feature (1)..( 9): Result.005 file - promoters50/2990064
ttatatata

SEQ ID NO: 181344 - DNA, 8 bp, Unknown
  misc_feature (1)..( 8): Result.005 file - promoters50/2990064
atcaccag

SEQ ID NO: 181345 - DNA, 8 bp, Unknown
  misc_feature (1)..( 8): Result.005 file - promoters50/2990064
ttcaccag

SEQ ID NO: 181346 - DNA, 8 bp, Unknown
  misc_feature (1)..( 8): Result.005 file - promoters50/2990064
ttctccat

SEQ ID NO: 181347 - DNA, 10 bp, Unknown
  misc_feature (1)..( 10): Result.005 file - promoters50/2990064
gttgtccgat

SEQ ID NO: 181348 - DNA, 10 bp, Unknown
  misc_feature (1)..( 10): Result.005 file - promoters50/2990064
cttgtctgat

SEQ ID NO: 181349 - DNA, 10 bp, Unknown
  misc_feature (1)..( 10): Result.005 file - promoters50/2990064
cttgtcatat

SEQ ID NO: 181350 - DNA, 27 bp, Unknown
  misc_feature (1)..( 27): Result.005 file - promoters50/2990064
tcttgtcatataaacgtccgtatagga

SEQ ID NO: 181351 - DNA, 27 bp, Unknown
  misc_feature (1)..( 27): Result.005 file - promoters50/2990064
tcttgtcatataaatgtccatatagga

SEQ ID NO: 181352 - DNA, 27 bp, Unknown
  misc_feature (1)..( 27): Result.005 file - promoters50/2990064
tcgtgacatatgaacgttcttattaca

SEQ ID NO: 181353 - DNA, 39 bp, Unknown
  misc_feature (1)..( 39): Result.005 file - promoters50/2990064
gattcatacccacatgatcttgtcttctcaccataagtt

SEQ ID NO: 181354 - DNA, 39 bp, Unknown
  misc_feature (1)..( 39): Result.005 file - promoters50/2990064
aatttatacccacatgatcatgtcttctaaccacaagtt

SEQ ID NO: 181355 - DNA, 39 bp, Unknown
  misc_feature (1)..( 39): Result.005 file - promoters50/2990064
gattcatactcacatggtcatgtcttctcagttctcacc

SEQ ID NO: 181356 - DNA, 19 bp, Unknown
  misc_feature (1)..( 19): Result.005 file - promoters50/2990064
tatagtccacaagttgatt

SEQ ID NO: 181357 - DNA, 19 bp, Unknown
  misc_feature (1)..( 19): Result.005 file - promoters50/2990064
tatagtccactagttgaat

SEQ ID NO: 181358 - DNA, 19 bp, Unknown
  misc_feature (1)..( 19): Result.005 file - promoters50/2990064
tttaatccacaagttgatt

SEQ ID NO: 181359 - DNA, 16 bp, Unknown
  misc_feature (1)..( 16): Result.005 file - promoters50/2990064
tgacataattgattac

SEQ ID NO: 181360 - DNA, 16 bp, Unknown
  misc_feature (1)..( 16): Result.005 file - promoters50/2990064
agacataattgattac

SEQ ID NO: 181361 - DNA, 16 bp, Unknown
  misc_feature (1)..( 16): Result.005 file - promoters50/2990064
tgaaataagattgatt

SEQ ID NO: 181362 - DNA, 15 bp, Unknown
  misc_feature (1)..( 15): Result.005 file - promoters50/2990064
aacttgggaccctta

SEQ ID NO: 181363 - DNA, 15 bp, Unknown
  misc_feature (1)..( 15): Result.005 file - promoters50/2990064
aacttgggaccctta

SEQ ID NO: 181364 - DNA, 15 bp, Unknown
  misc_feature (1)..( 15): Result.005 file - promoters50/2990064
aacttgggaccatag

SEQ ID NO: 181365 - DNA, 10 bp, Unknown
  misc_feature (1)..( 10): Result.005 file - promoters50/2990087
aaaaatataa

SEQ ID NO: 181366 - DNA, 10 bp, Unknown
  misc_feature (1)..( 10): Result.005 file - promoters50/2990087
aaaactattt

SEQ ID NO: 181367 - DNA, 10 bp, Unknown
  misc_feature (1)..( 10): Result.005 file - promoters50/2990087
tcaaccattt

SEQ ID NO: 181368 - DNA, 7 bp, Unknown
  misc_feature (1)..( 7): Result.005 file - promoters50/2990087
ttttctt

SEQ ID NO: 181369 - DNA, 7 bp, Unknown
  misc_feature (1)..( 7): Result.005 file - promoters50/2990087
ttttctt

SEQ ID NO: 181370 - DNA, 7 bp, Unknown
  misc_feature (1)..( 7): Result.005 file - promoters50/2990087
ttttttg

SEQ ID NO: 181371 - DNA, 9 bp, Unknown
  misc_feature (1)..( 9): Result.005 file - promoters50/2990087
actatatat

SEQ ID NO: 181372 - DNA, 9 bp, Unknown
  misc_feature (1)..( 9): Result.005 file - promoters50/2990087
tgtatatat

SEQ ID NO: 181373 - DNA, 9 bp, Unknown
  misc_feature (1)..( 9): Result.005 file - promoters50/2990087
actttatat

SEQ ID NO: 181374 - DNA, 10 bp, Unknown
  misc_feature (1)..( 10): Result.005 file - promoters50/2990091
cttctttctt

SEQ ID NO: 181375 - DNA, 10 bp, Unknown
  misc_feature (1)..( 10): Result.005 file - promoters50/2990091
cttgttttaa

SEQ ID NO: 181376 - DNA, 10 bp, Unknown
  misc_feature (1)..( 10): Result.005 file - promoters50/2990091
tttgttttaa

SEQ ID NO: 181377 - DNA, 13 bp, Unknown
  misc_feature (1)..( 13): Result.005 file - promoters50/2990091
ttgtttctgttgt

SEQ ID NO: 181378 - DNA, 13 bp, Unknown
  misc_feature (1)..( 13): Result.005 file - promoters50/2990091
aagattctgtcac

SEQ ID NO: 181379 - DNA, 13 bp, Unknown
  misc_feature (1)..( 13): Result.005 file - promoters50/2990091
tctattgtgctct

SEQ ID NO: 181380 - DNA, 11 bp, Unknown
  misc_feature (1)..( 11): Result.005 file - promoters50/2990184
cgattttatat

SEQ ID NO: 181381 - DNA, 11 bp, Unknown
  misc_feature (1)..( 11): Result.005 file - promoters50/2990184
caattatatat

SEQ ID NO: 181382 - DNA, 11 bp, Unknown
  misc_feature (1)..( 11): Result.005 file - promoters50/2990184
taattatttgt

SEQ ID NO: 181383 - DNA, 11 bp, Unknown
  misc_feature (1)..( 11): Result.005 file - promoters50/2990184
taattaaagac

SEQ ID NO: 181384 - DNA, 10 bp, Unknown
  misc_feature (1)..( 10): Result.005 file - promoters50/2990184
ttgaataaat

SEQ ID NO: 181385 - DNA, 10 bp, Unknown
  misc_feature (1)..( 10): Result.005 file - promoters50/2990184
ttgactaaac

SEQ ID NO: 181386 - DNA, 10 bp, Unknown
  misc_feature (1)..( 10): Result.005 file - promoters50/2990184
taaaataaat

SEQ ID NO: 181387 - DNA, 10 bp, Unknown
  misc_feature (1)..( 10): Result.005 file - promoters50/2990184
aagaaaaaac

SEQ ID NO: 181388 - DNA, 10 bp, Unknown
  misc_feature (1)..( 10): Result.005 file - promoters50/2990184
ccaaacaaaa

SEQ ID NO: 181389 - DNA, 7 bp, Unknown
  misc_feature (1)..( 7): Result.005 file - promoters50/2990184
tttacat

SEQ ID NO: 181390 - DNA, 7 bp, Unknown
  misc_feature (1)..( 7): Result.005 file - promoters50/2990184
tttccat

SEQ ID NO: 181391 - DNA, 7 bp, Unknown
  misc_feature (1)..( 7): Result.005 file - promoters50/2990184
tttccaa

SEQ ID NO: 181392 - DNA, 8 bp, Unknown
  misc_feature (1)..( 8): Result.005 file - promoters50/2990184
tttgccag

SEQ ID NO: 181393 - DNA, 11 bp, Unknown
  misc_feature (1)..( 11): Result.005 file - promoters50/2990233
catttttgtta

SEQ ID NO: 181394 - DNA, 11 bp, Unknown
  misc_feature (1)..( 11): Result.005 file - promoters50/2990233
cgttttggtta

SEQ ID NO: 181395 - DNA, 11 bp, Unknown
  misc_feature (1)..( 11): Result.005 file - promoters50/2990233
cgtttcggtca

SEQ ID NO: 181396 - DNA, 13 bp, Unknown
  misc_feature (1)..( 13): Result.005 file - promoters50/2990233
tttattattttga

SEQ ID NO: 181397 - DNA, 13 bp, Unknown
  misc_feature (1)..( 13): Result.005 file - promoters50/2990233
tttgttatcttgc

SEQ ID NO: 181398 - DNA, 13 bp, Unknown
  misc_feature (1)..( 13): Result.005 file - promoters50/2990233
aaatgtattttga

SEQ ID NO: 181399 - DNA, 13 bp, Unknown
  misc_feature (1)..( 13): Result.005 file - promoters50/2990233
cagagtgtatttg

SEQ ID NO: 181400 - DNA, 6 bp, Unknown
  misc_feature (1)..( 6): Result.005 file - promoters50/2990233
agagac

SEQ ID NO: 181401 - DNA, 6 bp, Unknown
  misc_feature (1)..( 6): Result.005 file - promoters50/2990233
agagac

SEQ ID NO: 181402 - DNA, 6 bp, Unknown
  misc_feature (1)..( 6): Result.005 file - promoters50/2990233
agagac

SEQ ID NO: 181403 - DNA, 8 bp, Unknown
  misc_feature (1)..( 8): Result.005 file - promoters50/2990233
aaacataa

SEQ ID NO: 181404 - DNA, 8 bp, Unknown
  misc_feature (1)..( 8): Result.005 file - promoters50/2990233
aaacgtaa

SEQ ID NO: 181405 - DNA, 8 bp, Unknown
  misc_feature (1)..( 8): Result.005 file - promoters50/2990233
aaacataa

SEQ ID NO: 181406 - DNA, 7 bp, Unknown
  misc_feature (1)..( 7): Result.005 file - promoters50/2990249
acactta

SEQ ID NO: 181407 - DNA, 7 bp, Unknown
  misc_feature (1)..( 7): Result.005 file - promoters50/2990249
tcactta

SEQ ID NO: 181408 - DNA, 7 bp, Unknown
  misc_feature (1)..( 7): Result.005 file - promoters50/2990249
tcacttg

SEQ ID NO: 181409 - DNA, 7 bp, Unknown
  misc_feature (1)..( 7): Result.005 file - promoters50/2990249
tcacttt

SEQ ID NO: 181410 - DNA, 7 bp, Unknown
  misc_feature (1)..( 7): Result.005 file - promoters50/2990249
gcacttg

SEQ ID NO: 181411 - DNA, 12 bp, Unknown
  misc_feature (1)..( 12): Result.005 file - promoters50/2990249
ataacaatatat

SEQ ID NO: 181412 - DNA, 12 bp, Unknown
  misc_feature (1)..( 12): Result.005 file - promoters50/2990249
aaaacaatcaca

SEQ ID NO: 181413 - DNA, 12 bp, Unknown
  misc_feature (1)..( 12): Result.005 file - promoters50/2990249
ataagaatatat

SEQ ID NO: 181414 - DNA, 12 bp, Unknown
  misc_feature (1)..( 12): Result.005 file - promoters50/2990249
aaaacaatcgtc

SEQ ID NO: 181415 - DNA, 12 bp, Unknown
  misc_feature (1)..( 12): Result.005 file - promoters50/2990249
taaacaaaacgt

SEQ ID NO: 181416 - DNA, 13 bp, Unknown
  misc_feature (1)..( 13): Result.005 file - promoters50/2990249
aaaatcaaatagt

SEQ ID NO: 181417 - DNA, 13 bp, Unknown
  misc_feature (1)..( 13): Result.005 file - promoters50/2990249
aagcaaaagcaat

SEQ ID NO: 181418 - DNA, 13 bp, Unknown
  misc_feature (1)..( 13): Result.005 file - promoters50/2990249
ggtcaaaatcaaa

SEQ ID NO: 181419 - DNA, 13 bp, Unknown
  misc_feature (1)..( 13): Result.005 file - promoters50/2990249
aagaaaaagtttt

SEQ ID NO: 181420 - DNA, 13 bp, Unknown
  misc_feature (1)..( 13): Result.005 file - promoters50/2990249
tacgtgaagaaat

SEQ ID NO: 181421 - DNA, 13 bp, Unknown
  misc_feature (1)..( 13): Result.005 file - promoters50/2990249
acttaaaagaaag

SEQ ID NO: 181422 - DNA, 12 bp, Unknown
  misc_feature (1)..( 12): Result.005 file - promoters50/2990249
tgatatacacta

SEQ ID NO: 181423 - DNA, 12 bp, Unknown
  misc_feature (1)..( 12): Result.005 file - promoters50/2990249
aaatatacaaac

SEQ ID NO: 181424 - DNA, 12 bp, Unknown
  misc_feature (1)..( 12): Result.005 file - promoters50/2990249
tgatatactcta

SEQ ID NO: 181425 - DNA, 12 bp, Unknown
  misc_feature (1)..( 12): Result.005 file - promoters50/2990249
tgaaataaatta

SEQ ID NO: 181426 - DNA, 12 bp, Unknown
  misc_feature (1)..( 12): Result.005 file - promoters50/2990249
taatataactct

SEQ ID NO: 181427 - DNA, 9 bp, Unknown
  misc_feature (1)..( 9): Result.005 file - promoters50/2990253
agcatgcgt

SEQ ID NO: 181428 - DNA, 9 bp, Unknown
  misc_feature (1)..( 9): Result.005 file - promoters50/2990253
agcatgggc

SEQ ID NO: 181429 - DNA, 9 bp, Unknown
  misc_feature (1)..( 9): Result.005 file - promoters50/2990253
agaatgcat

SEQ ID NO: 181430 - DNA, 11 bp, Unknown
  misc_feature (1)..( 11): Result.005 file - promoters50/2990263
attggagtcga

SEQ ID NO: 181431 - DNA, 11 bp, Unknown
  misc_feature (1)..( 11): Result.005 file - promoters50/2990263
atttgagtaaa

SEQ ID NO: 181432 - DNA, 11 bp, Unknown
  misc_feature (1)..( 11): Result.005 file - promoters50/2990263
atttgagaaat

SEQ ID NO: 181433 - DNA, 11 bp, Unknown
  misc_feature (1)..( 11): Result.005 file - promoters50/2990263
atttgaaaaac

SEQ ID NO: 181434 - DNA, 11 bp, Unknown
  misc_feature (1)..( 11): Result.005 file - promoters50/2990263
ttttaagaaag

SEQ ID NO: 181435 - DNA, 11 bp, Unknown
  misc_feature (1)..( 11): Result.005 file - promoters50/2990263
gatttagaaag

SEQ ID NO: 181436 - DNA, 14 bp, Unknown
  misc_feature (1)..( 14): Result.005 file - promoters50/2990263
ggagtcgaagaagg

SEQ ID NO: 181437 - DNA, 14 bp, Unknown
  misc_feature (1)..( 14): Result.005 file - promoters50/2990263
caaatcgaagaaag

SEQ ID NO: 181438 - DNA, 14 bp, Unknown
  misc_feature (1)..( 14): Result.005 file - promoters50/2990263
caattttaagaaag

SEQ ID NO: 181439 - DNA, 14 bp, Unknown
  misc_feature (1)..( 14): Result.005 file - promoters50/2990263
caaattgaaaccaa

SEQ ID NO: 181440 - DNA, 14 bp, Unknown
  misc_feature (1)..( 14): Result.005 file - promoters50/2990263
gttatttgagaaat

SEQ ID NO: 181441 - DNA, 14 bp, Unknown
  misc_feature (1)..( 14): Result.005 file - promoters50/2990263
agagatttagaaag

SEQ ID NO: 181442 - DNA, 14 bp, Unknown
  misc_feature (1)..( 14): Result.005 file - promoters50/2990263
aaatttgaaaaaca

SEQ ID NO: 181443 - DNA, 7 bp, Unknown
  misc_feature (1)..( 7): Result.005 file - promoters50/2990355
caaatct

SEQ ID NO: 181444 - DNA, 7 bp, Unknown
  misc_feature (1)..( 7): Result.005 file - promoters50/2990355
taaatct

SEQ ID NO: 181445 - DNA, 7 bp, Unknown
  misc_feature (1)..( 7): Result.005 file - promoters50/2990355
taactct

SEQ ID NO: 181446 - DNA, 10 bp, Unknown
  misc_feature (1)..( 10): Result.005 file - promoters50/2990457
tccaaaggag

SEQ ID NO: 181447 - DNA, 10 bp, Unknown
  misc_feature (1)..( 10): Result.005 file - promoters50/2990457
tccaaacttt

SEQ ID NO: 181448 - DNA, 10 bp, Unknown
  misc_feature (1)..( 10): Result.005 file - promoters50/2990457
accaaatttt

SEQ ID NO: 181449 - DNA, 10 bp, Unknown
  misc_feature (1)..( 10): Result.005 file - promoters50/2990457
atgtttatta

SEQ ID NO: 181450 - DNA, 10 bp, Unknown
  misc_feature (1)..( 10): Result.005 file - promoters50/2990457
aagttgatta

SEQ ID NO: 181451 - DNA, 10 bp, Unknown
  misc_feature (1)..( 10): Result.005 file - promoters50/2990457
atgtatattc

SEQ ID NO: 181452 - DNA, 8 bp, Unknown
  misc_feature (1)..( 8): Result.005 file - promoters50/2990457
ctatataa

SEQ ID NO: 181453 - DNA, 8 bp, Unknown
  misc_feature (1)..( 8): Result.005 file - promoters50/2990457
ttatataa

SEQ ID NO: 181454 - DNA, 8 bp, Unknown
  misc_feature (1)..( 8): Result.005 file - promoters50/2990457
ttatatca

SEQ ID NO: 181455 - DNA, 7 bp, Unknown
  misc_feature (1)..( 7): Result.005 file - promoters50/2990457
caaatta

SEQ ID NO: 181456 - DNA, 7 bp, Unknown
  misc_feature (1)..( 7): Result.005 file - promoters50/2990457
caaattt

SEQ ID NO: 181457 - DNA, 7 bp, Unknown
  misc_feature (1)..( 7): Result.005 file - promoters50/2990457
caaattt

SEQ ID NO: 181458 - DNA, 7 bp, Unknown
  misc_feature (1)..( 7): Result.005 file - promoters50/2990457
attattt

SEQ ID NO: 181459 - DNA, 7 bp, Unknown
  misc_feature (1)..( 7): Result.005 file - promoters50/2990457
tttattt

SEQ ID NO: 181460 - DNA, 7 bp, Unknown
  misc_feature (1)..( 7): Result.005 file - promoters50/2990457
tttatta

SEQ ID NO: 181461 - DNA, 11 bp, Unknown
  misc_feature (1)..( 11): Result.005 file - promoters50/2990457
gatgtttaaca

SEQ ID NO: 181462 - DNA, 11 bp, Unknown
  misc_feature (1)..( 11): Result.005 file - promoters50/2990457
gatttttaaat

SEQ ID NO: 181463 - DNA, 11 bp, Unknown
  misc_feature (1)..( 11): Result.005 file - promoters50/2990457
gagtttcaaat

SEQ ID NO: 181464 - DNA, 12 bp, Unknown
  misc_feature (1)..( 12): Result.005 file - promoters50/2990528
gaattatacttg

SEQ ID NO: 181465 - DNA, 12 bp, Unknown
  misc_feature (1)..( 12): Result.005 file - promoters50/2990528
taattatgttat

SEQ ID NO: 181466 - DNA, 12 bp, Unknown
  misc_feature (1)..( 12): Result.005 file - promoters50/2990528
gaaatataaata

SEQ ID NO: 181467 - DNA, 12 bp, Unknown
  misc_feature (1)..( 12): Result.005 file - promoters50/2990528
gatatataaact

SEQ ID NO: 181468 - DNA, 12 bp, Unknown
  misc_feature (1)..( 12): Result.005 file - promoters50/2990528
ggtatataattc

SEQ ID NO: 181469 - DNA, 12 bp, Unknown
  misc_feature (1)..( 12): Result.005 file - promoters50/2990528
gttttatgaaat

SEQ ID NO: 181470 - DNA, 14 bp, Unknown
  misc_feature (1)..( 14): Result.005 file - promoters50/2990548
tcttcctttgtctc

SEQ ID NO: 181471 - DNA, 14 bp, Unknown
  misc_feature (1)..( 14): Result.005 file - promoters50/2990548
tcggtgtttgtcat

SEQ ID NO: 181472 - DNA, 14 bp, Unknown
  misc_feature (1)..( 14): Result.005 file - promoters50/2990548
tcttcgtttgttaa

SEQ ID NO: 181473 - DNA, 14 bp, Unknown
  misc_feature (1)..( 14): Result.005 file - promoters50/2990548
ggtttgtttatctc

SEQ ID NO: 181474 - DNA, 14 bp, Unknown
  misc_feature (1)..( 14): Result.005 file - promoters50/2990548
gacaggtttgtgag

SEQ ID NO: 181475 - DNA, 14 bp, Unknown
  misc_feature (1)..( 14): Result.005 file - promoters50/2990548
cctagatgtgtata

SEQ ID NO: 181476 - DNA, 9 bp, Unknown
  misc_feature (1)..( 9): Result.005 file - promoters50/2990611
atttattta

SEQ ID NO: 181477 - DNA, 9 bp, Unknown
  misc_feature (1)..( 9): Result.005 file - promoters50/2990611
gtttctttt

SEQ ID NO: 181478 - DNA, 9 bp, Unknown
  misc_feature (1)..( 9): Result.005 file - promoters50/2990611
atttatttt

SEQ ID NO: 181479 - DNA, 9 bp, Unknown
  misc_feature (1)..( 9): Result.005 file - promoters50/2990611
ttttcttaa

SEQ ID NO: 181480 - DNA, 9 bp, Unknown
  misc_feature (1)..( 9): Result.005 file - promoters50/2990611
gtttcttta

SEQ ID NO: 181481 - DNA, 9 bp, Unknown
  misc_feature (1)..( 9): Result.005 file - promoters50/2990611
ttttacttg

SEQ ID NO: 181482 - DNA, 15 bp, Unknown
  misc_feature (1)..( 15): Result.005 file - promoters50/2990611
tagtataaataaagc

SEQ ID NO: 181483 - DNA, 15 bp, Unknown
  misc_feature (1)..( 15): Result.005 file - promoters50/2990611
gtgtataaattgtaa

SEQ ID NO: 181484 - DNA, 15 bp, Unknown
  misc_feature (1)..( 15): Result.005 file - promoters50/2990611
cattatatatagaaa

SEQ ID NO: 181485 - DNA, 15 bp, Unknown
  misc_feature (1)..( 15): Result.005 file - promoters50/2990611
ccatataaatagagc

SEQ ID NO: 181486 - DNA, 15 bp, Unknown
  misc_feature (1)..( 15): Result.005 file - promoters50/2990611
tcctataaattgaac

SEQ ID NO: 181487 - DNA, 15 bp, Unknown
  misc_feature (1)..( 15): Result.005 file - promoters50/2990611
tcttatatattctta

SEQ ID NO: 181488 - DNA, 15 bp, Unknown
  misc_feature (1)..( 15): Result.005 file - promoters50/2990611
tcctataaatataag

SEQ ID NO: 181489 - DNA, 14 bp, Unknown
  misc_feature (1)..( 14): Result.005 file - promoters50/2990611
attaaaaacttaat

SEQ ID NO: 181490 - DNA, 14 bp, Unknown
  misc_feature (1)..( 14): Result.005 file - promoters50/2990611
gaaaaaaacaaata

SEQ ID NO: 181491 - DNA, 14 bp, Unknown
  misc_feature (1)..( 14): Result.005 file - promoters50/2990611
aaaaaaaacaaaga

SEQ ID NO: 181492 - DNA, 14 bp, Unknown
  misc_feature (1)..( 14): Result.005 file - promoters50/2990611
attacaaagagata

SEQ ID NO: 181493 - DNA, 14 bp, Unknown
  misc_feature (1)..( 14): Result.005 file - promoters50/2990611
cccataaagcaaac

SEQ ID NO: 181494 - DNA, 14 bp, Unknown
  misc_feature (1)..( 14): Result.005 file - promoters50/2990611
gctaaaaataacaa

SEQ ID NO: 181495 - DNA, 13 bp, Unknown
  misc_feature (1)..( 13): Result.005 file - promoters50/2990611
caacaaatttatt

SEQ ID NO: 181496 - DNA, 13 bp, Unknown
  misc_feature (1)..( 13): Result.005 file - promoters50/2990611
aaacaaataaaat

SEQ ID NO: 181497 - DNA, 13 bp, Unknown
  misc_feature (1)..( 13): Result.005 file - promoters50/2990611
aaacaaagacgtc

SEQ ID NO: 181498 - DNA, 13 bp, Unknown
  misc_feature (1)..( 13): Result.005 file - promoters50/2990611
caaaaaaaggaaa

SEQ ID NO: 181499 - DNA, 14 bp, Unknown
  misc_feature (1)..( 14): Result.005 file - promoters50/2990611
aaagcaaacaatgg

SEQ ID NO: 181500 - DNA, 14 bp, Unknown
  misc_feature (1)..( 14): Result.005 file - promoters50/2990611
gctaaaaataacaa

SEQ ID NO: 181501 - DNA, 11 bp, Unknown
  misc_feature (1)..( 11): Result.005 file - promoters50/2990611
ttaatttattc

SEQ ID NO: 181502 - DNA, 11 bp, Unknown
  misc_feature (1)..( 11): Result.005 file - promoters50/2990611
ttaaattaaca

SEQ ID NO: 181503 - DNA, 11 bp, Unknown
  misc_feature (1)..( 11): Result.005 file - promoters50/2990611
gtaatttggtt

SEQ ID NO: 181504 - DNA, 11 bp, Unknown
  misc_feature (1)..( 11): Result.005 file - promoters50/2990611
ataatcaaaag

SEQ ID NO: 181505 - DNA, 12 bp, Unknown
  misc_feature (1)..( 12): Result.005 file - promoters50/2990611
atgaattaccaa

SEQ ID NO: 181506 - DNA, 11 bp, Unknown
  misc_feature (1)..( 11): Result.005 file - promoters50/2990611
aaaaataagaa

SEQ ID NO: 181507 - DNA, 12 bp, Unknown
  misc_feature (1)..( 12): Result.005 file - promoters50/2990611
ttatatttagtc

SEQ ID NO: 181508 - DNA, 16 bp, Unknown
  misc_feature (1)..( 16): Result.005 file - promoters50/2990611
ccataaaggaaaaagc

SEQ ID NO: 181509 - DNA, 16 bp, Unknown
  misc_feature (1)..( 16): Result.005 file - promoters50/2990611
tgtttatggaaaattg

SEQ ID NO: 181510 - DNA, 16 bp, Unknown
  misc_feature (1)..( 16): Result.005 file - promoters50/2990611
ccaaaaaagaaatatg

SEQ ID NO: 181511 - DNA, 16 bp, Unknown
  misc_feature (1)..( 16): Result.005 file - promoters50/2990611
ttcttaaacaaaattg

SEQ ID NO: 181512 - DNA, 16 bp, Unknown
  misc_feature (1)..( 16): Result.005 file - promoters50/2990611
gattaatactaaataa

SEQ ID NO: 181513 - DNA, 16 bp, Unknown
  misc_feature (1)..( 16): Result.005 file - promoters50/2990611
gtatataagatatatg

SEQ ID NO: 181514 - DNA, 16 bp, Unknown
  misc_feature (1)..( 16): Result.005 file - promoters50/2990611
cacaaaataaagtaat

SEQ ID NO: 181515 - DNA, 16 bp, Unknown
  misc_feature (1)..( 16): Result.005 file - promoters50/2990611
cgaaaaataaataaaa

SEQ ID NO: 181516 - DNA, 16 bp, Unknown
  misc_feature (1)..( 16): Result.005 file - promoters50/2990611
ctcaaaaaaacgttaa

SEQ ID NO: 181517 - DNA, 16 bp, Unknown
  misc_feature (1)..( 16): Result.005 file - promoters50/2990611
cgataaatttgctcga

SEQ ID NO: 181518 - DNA, 16 bp, Unknown
  misc_feature (1)..( 16): Result.005 file - promoters50/2990611
gaaatcataattttgc

SEQ ID NO: 181519 - DNA, 16 bp, Unknown
  misc_feature (1)..( 16): Result.005 file - promoters50/2990611
atgtcgatagtttaac

SEQ ID NO: 181520 - DNA, 16 bp, Unknown
  misc_feature (1)..( 16): Result.005 file - promoters50/2990611
tgaacaattatcgact

SEQ ID NO: 181521 - DNA, 8 bp, Unknown
  misc_feature (1)..( 8): Result.005 file - promoters50/2990659
ttaaaaaa

SEQ ID NO: 181522 - DNA, 8 bp, Unknown
  misc_feature (1)..( 8): Result.005 file - promoters50/2990659
ttacaaaa

SEQ ID NO: 181523 - DNA, 8 bp, Unknown
  misc_feature (1)..( 8): Result.005 file - promoters50/2990659
ttaaaatc

SEQ ID NO: 181524 - DNA, 8 bp, Unknown
  misc_feature (1)..( 8): Result.005 file - promoters50/2990659
aaaatggt

SEQ ID NO: 181525 - DNA, 8 bp, Unknown
  misc_feature (1)..( 8): Result.005 file - promoters50/2990659
aaaatgaa

SEQ ID NO: 181526 - DNA, 8 bp, Unknown
  misc_feature (1)..( 8): Result.005 file - promoters50/2990659
aaattgtc

SEQ ID NO: 181527 - DNA, 7 bp, Unknown
  misc_feature (1)..( 7): Result.005 file - promoters50/2990712
actttag

SEQ ID NO: 181528 - DNA, 7 bp, Unknown
  misc_feature (1)..( 7): Result.005 file - promoters50/2990712
tctttag

SEQ ID NO: 181529 - DNA, 7 bp, Unknown
  misc_feature (1)..( 7): Result.005 file - promoters50/2990712
tctctag

SEQ ID NO: 181530 - DNA, 9 bp, Unknown
  misc_feature (1)..( 9): Result.005 file - promoters50/2990712
ataaataca

SEQ ID NO: 181531 - DNA, 9 bp, Unknown
  misc_feature (1)..( 9): Result.005 file - promoters50/2990712
atatataga

SEQ ID NO: 181532 - DNA, 9 bp, Unknown
  misc_feature (1)..( 9): Result.005 file - promoters50/2990712
atacagaaa

SEQ ID NO: 181533 - DNA, 8 bp, Unknown
  misc_feature (1)..( 8): Result.005 file - promoters50/2990777
attcaaaa

SEQ ID NO: 181534 - DNA, 8 bp, Unknown
  misc_feature (1)..( 8): Result.005 file - promoters50/2990777
tttcgaaa

SEQ ID NO: 181535 - DNA, 8 bp, Unknown
  misc_feature (1)..( 8): Result.005 file - promoters50/2990777
attcaaca

SEQ ID NO: 181536 - DNA, 9 bp, Unknown
  misc_feature (1)..( 9): Result.005 file - promoters50/2990777
aaagtacaa

SEQ ID NO: 181537 - DNA, 9 bp, Unknown
  misc_feature (1)..( 9): Result.005 file - promoters50/2990777
aaagtaaag

SEQ ID NO: 181538 - DNA, 9 bp, Unknown
  misc_feature (1)..( 9): Result.005 file - promoters50/2990777
aaagaaaag

SEQ ID NO: 181539 - DNA, 9 bp, Unknown
  misc_feature (1)..( 9): Result.005 file - promoters50/2990839
caacaaatt

SEQ ID NO: 181540 - DNA, 9 bp, Unknown
  misc_feature (1)..( 9): Result.005 file - promoters50/2990839
taacaaaaa

SEQ ID NO: 181541 - DNA, 9 bp, Unknown
  misc_feature (1)..( 9): Result.005 file - promoters50/2990839
taataaaga

SEQ ID NO: 181542 - DNA, 9 bp, Unknown
  misc_feature (1)..( 9): Result.005 file - promoters50/2990839
ggataaaga

SEQ ID NO: 181543 - DNA, 8 bp, Unknown
  misc_feature (1)..( 8): Result.005 file - promoters50/2990839
aaaaaagt

SEQ ID NO: 181544 - DNA, 8 bp, Unknown
  misc_feature (1)..( 8): Result.005 file - promoters50/2990839
aaaaaaat

SEQ ID NO: 181545 - DNA, 8 bp, Unknown
  misc_feature (1)..( 8): Result.005 file - promoters50/2990839
aaaacgtt

SEQ ID NO: 181546 - DNA, 26 bp, Unknown
  misc_feature (1)..( 26): Result.005 file - promoters50/2990839
tccatatacgttatgtaaaatatttt

SEQ ID NO: 181547 - DNA, 26 bp, Unknown
  misc_feature (1)..( 26): Result.005 file - promoters50/2990839
caagcccactacatgttaaagcccaa

SEQ ID NO: 181548 - DNA, 27 bp, Unknown
  misc_feature (1)..( 27): Result.005 file - promoters50/2990839
ttaaggcccaataagtaacaataaaga

SEQ ID NO: 181549 - DNA, 27 bp, Unknown
  misc_feature (1)..( 27): Result.005 file - promoters50/2990839
taaaatattttcgatacttaataaatt

SEQ ID NO: 181550 - DNA, 27 bp, Unknown
  misc_feature (1)..( 27): Result.005 file - promoters50/2990839
ttaaagcccaagaagtaacaataaaga

SEQ ID NO: 181551 - DNA, 27 bp, Unknown
  misc_feature (1)..( 27): Result.005 file - promoters50/2990839
ttaaggcccaataagtaacaataaaga

SEQ ID NO: 181552 - DNA, 10 bp, Unknown
  misc_feature (1)..( 10): Result.005 file - promoters50/2990839
tttattaaaa

SEQ ID NO: 181553 - DNA, 10 bp, Unknown
  misc_feature (1)..( 10): Result.005 file - promoters50/2990839
tattttaaaa

SEQ ID NO: 181554 - DNA, 10 bp, Unknown
  misc_feature (1)..( 10): Result.005 file - promoters50/2990839
tttattgaaa

SEQ ID NO: 181555 - DNA, 8 bp, Unknown
  misc_feature (1)..( 8): Result.005 file - promoters50/2990928
gaaaatta

SEQ ID NO: 181556 - DNA, 8 bp, Unknown
  misc_feature (1)..( 8): Result.005 file - promoters50/2990928
caaaattg

SEQ ID NO: 181557 - DNA, 8 bp, Unknown
  misc_feature (1)..( 8): Result.005 file - promoters50/2990928
gaaaatta

SEQ ID NO: 181558 - DNA, 8 bp, Unknown
  misc_feature (1)..( 8): Result.005 file - promoters50/2990928
caaaatca

SEQ ID NO: 181559 - DNA, 7 bp, Unknown
  misc_feature (1)..( 7): Result.005 file - promoters50/2991101
tttgttt

SEQ ID NO: 181560 - DNA, 7 bp, Unknown
  misc_feature (1)..( 7): Result.005 file - promoters50/2991101
ttttttt

SEQ ID NO: 181561 - DNA, 7 bp, Unknown
  misc_feature (1)..( 7): Result.005 file - promoters50/2991101
tttattt

SEQ ID NO: 181562 - DNA, 9 bp, Unknown
  misc_feature (1)..( 9): Result.005 file - promoters50/2991101
tctttttcc

SEQ ID NO: 181563 - DNA, 9 bp, Unknown
  misc_feature (1)..( 9): Result.005 file - promoters50/2991101
tctttttct

SEQ ID NO: 181564 - DNA, 9 bp, Unknown
  misc_feature (1)..( 9): Result.005 file - promoters50/2991101
gttttttcc

SEQ ID NO: 181565 - DNA, 10 bp, Unknown
  misc_feature (1)..( 10): Result.005 file - promoters50/2991141
aattatgtta

SEQ ID NO: 181566 - DNA, 10 bp, Unknown
  misc_feature (1)..( 10): Result.005 file - promoters50/2991141
aattatttta

SEQ ID NO: 181567 - DNA, 10 bp, Unknown
  misc_feature (1)..( 10): Result.005 file - promoters50/2991141
aatgattgga

SEQ ID NO: 181568 - DNA, 9 bp, Unknown
  misc_feature (1)..( 9): Result.005 file - promoters50/2991141
tcaaacaac

SEQ ID NO: 181569 - DNA, 9 bp, Unknown
  misc_feature (1)..( 9): Result.005 file - promoters50/2991141
ctaaacaac

SEQ ID NO: 181570 - DNA, 9 bp, Unknown
  misc_feature (1)..( 9): Result.005 file - promoters50/2991141
tcagacaca

SEQ ID NO: 181571 - DNA, 8 bp, Unknown
  misc_feature (1)..( 8): Result.005 file - promoters50/2991141
tttatttt

SEQ ID NO: 181572 - DNA, 8 bp, Unknown
  misc_feature (1)..( 8): Result.005 file - promoters50/2991141
tttatttt

SEQ ID NO: 181573 - DNA, 8 bp, Unknown
  misc_feature (1)..( 8): Result.005 file - promoters50/2991141
attagttt

SEQ ID NO: 181574 - DNA, 7 bp, Unknown
  misc_feature (1)..( 7): Result.005 file - promoters50/2991141
attaatg

SEQ ID NO: 181575 - DNA, 7 bp, Unknown
  misc_feature (1)..( 7): Result.005 file - promoters50/2991141
tttaatg

SEQ ID NO: 181576 - DNA, 7 bp, Unknown
  misc_feature (1)..( 7): Result.005 file - promoters50/2991141
tttcatg

SEQ ID NO: 181577 - DNA, 8 bp, Unknown
  misc_feature (1)..( 8): Result.005 file - promoters50/2991141
gttttttc

SEQ ID NO: 181578 - DNA, 8 bp, Unknown
  misc_feature (1)..( 8): Result.005 file - promoters50/2991141
gtttttaa

SEQ ID NO: 181579 - DNA, 8 bp, Unknown
  misc_feature (1)..( 8): Result.005 file - promoters50/2991141
gtttctaa

SEQ ID NO: 181580 - DNA, 16 bp, Unknown
  misc_feature (1)..( 16): Result.005 file - promoters50/2991227
atttagaccattgatt

SEQ ID NO: 181581 - DNA, 16 bp, Unknown
  misc_feature (1)..( 16): Result.005 file - promoters50/2991227
ccttagacaattgatt

SEQ ID NO: 181582 - DNA, 16 bp, Unknown
  misc_feature (1)..( 16): Result.005 file - promoters50/2991227
atttcgaccaatttta

SEQ ID NO: 181583 - DNA, 16 bp, Unknown
  misc_feature (1)..( 16): Result.005 file - promoters50/2991227
tggtcgatcaaacccg

SEQ ID NO: 181584 - DNA, 10 bp, Unknown
  misc_feature (1)..( 10): Result.005 file - promoters50/2991227
ttgacttctc

SEQ ID NO: 181585 - DNA, 10 bp, Unknown
  misc_feature (1)..( 10): Result.005 file - promoters50/2991227
ttgactgctc

SEQ ID NO: 181586 - DNA, 10 bp, Unknown
  misc_feature (1)..( 10): Result.005 file - promoters50/2991227
gtgattgcat

SEQ ID NO: 181587 - DNA, 10 bp, Unknown
  misc_feature (1)..( 10): Result.005 file - promoters50/2991227
cagactgctt

SEQ ID NO: 181588 - DNA, 9 bp, Unknown
  misc_feature (1)..( 9): Result.005 file - promoters50/2991235
catggaggt

SEQ ID NO: 181589 - DNA, 9 bp, Unknown
  misc_feature (1)..( 9): Result.005 file - promoters50/2991235
catagagaa

SEQ ID NO: 181590 - DNA, 9 bp, Unknown
  misc_feature (1)..( 9): Result.005 file - promoters50/2991235
agtagagaa

SEQ ID NO: 181591 - DNA, 8 bp, Unknown
  misc_feature (1)..( 8): Result.005 file - promoters50/2991235
cgataaca

SEQ ID NO: 181592 - DNA, 8 bp, Unknown
  misc_feature (1)..( 8): Result.005 file - promoters50/2991235
ggataaca

SEQ ID NO: 181593 - DNA, 8 bp, Unknown
  misc_feature (1)..( 8): Result.005 file - promoters50/2991235
ggataaaa

SEQ ID NO: 181594 - DNA, 9 bp, Unknown
  misc_feature (1)..( 9): Result.005 file - promoters50/2991235
aatcaacaa

SEQ ID NO: 181595 - DNA, 9 bp, Unknown
  misc_feature (1)..( 9): Result.005 file - promoters50/2991235
tagcaacaa

SEQ ID NO: 181596 - DNA, 9 bp, Unknown
  misc_feature (1)..( 9): Result.005 file - promoters50/2991235
tctcaacac

SEQ ID NO: 181597 - DNA, 9 bp, Unknown
  misc_feature (1)..( 9): Result.005 file - promoters50/2991235
tctgaacaa

SEQ ID NO: 181598 - DNA, 8 bp, Unknown
  misc_feature (1)..( 8): Result.005 file - promoters50/2991235
aaacccaa

SEQ ID NO: 181599 - DNA, 8 bp, Unknown
  misc_feature (1)..( 8): Result.005 file - promoters50/2991235
caacacaa

SEQ ID NO: 181600 - DNA, 8 bp, Unknown
  misc_feature (1)..( 8): Result.005 file - promoters50/2991235
aaacccta

SEQ ID NO: 181601 - DNA, 8 bp, Unknown
  misc_feature (1)..( 8): Result.005 file - promoters50/2991235
caacacca

SEQ ID NO: 181602 - DNA, 8 bp, Unknown
  misc_feature (1)..( 8): Result.005 file - promoters50/2991235
gaaaaaac

SEQ ID NO: 181603 - DNA, 8 bp, Unknown
  misc_feature (1)..( 8): Result.005 file - promoters50/2991235
gaagaaac

SEQ ID NO: 181604 - DNA, 8 bp, Unknown
  misc_feature (1)..( 8): Result.005 file - promoters50/2991235
gaagaaac

SEQ ID NO: 181605 - DNA, 8 bp, Unknown
  misc_feature (1)..( 8): Result.005 file - promoters50/2991235
gtgaagat

SEQ ID NO: 181606 - DNA, 8 bp, Unknown
  misc_feature (1)..( 8): Result.005 file - promoters50/2991235
aagaagat

SEQ ID NO: 181607 - DNA, 8 bp, Unknown
  misc_feature (1)..( 8): Result.005 file - promoters50/2991235
aagcagag

SEQ ID NO: 181608 - DNA, 13 bp, Unknown
  misc_feature (1)..( 13): Result.005 file - promoters50/2991235
gaagcatttagta

SEQ ID NO: 181609 - DNA, 13 bp, Unknown
  misc_feature (1)..( 13): Result.005 file - promoters50/2991235
gaagcacgaatgt

SEQ ID NO: 181610 - DNA, 13 bp, Unknown
  misc_feature (1)..( 13): Result.005 file - promoters50/2991235
gaagtagcattta

SEQ ID NO: 181611 - DNA, 8 bp, Unknown
  misc_feature (1)..( 8): Result.005 file - promoters50/2991235
gtagagtg

SEQ ID NO: 181612 - DNA, 8 bp, Unknown
  misc_feature (1)..( 8): Result.005 file - promoters50/2991235
gtagagaa

SEQ ID NO: 181613 - DNA, 8 bp, Unknown
  misc_feature (1)..( 8): Result.005 file - promoters50/2991235
atagagaa

SEQ ID NO: 181614 - DNA, 8 bp, Unknown
  misc_feature (1)..( 8): Result.005 file - promoters50/2991235
acttttgg

SEQ ID NO: 181615 - DNA, 8 bp, Unknown
  misc_feature (1)..( 8): Result.005 file - promoters50/2991235
tgttttgg

SEQ ID NO: 181616 - DNA, 8 bp, Unknown
  misc_feature (1)..( 8): Result.005 file - promoters50/2991235
tgttttgt

SEQ ID NO: 181617 - DNA, 13 bp, Unknown
  misc_feature (1)..( 13): Result.005 file - promoters50/2991239
aatattaaaaaag

SEQ ID NO: 181618 - DNA, 13 bp, Unknown
  misc_feature (1)..( 13): Result.005 file - promoters50/2991239
ccttttaaaaaaa

SEQ ID NO: 181619 - DNA, 13 bp, Unknown
  misc_feature (1)..( 13): Result.005 file - promoters50/2991239
aaatacaaaaaaa

SEQ ID NO: 181620 - DNA, 13 bp, Unknown
  misc_feature (1)..( 13): Result.005 file - promoters50/2991239
aatatcaaaacaa

SEQ ID NO: 181621 - DNA, 13 bp, Unknown
  misc_feature (1)..( 13): Result.005 file - promoters50/2991239
cagtaaaaaaaaa

SEQ ID NO: 181622 - DNA, 14 bp, Unknown
  misc_feature (1)..( 14): Result.005 file - promoters50/2991239
tgctataaagaaag

SEQ ID NO: 181623 - DNA, 14 bp, Unknown
  misc_feature (1)..( 14): Result.005 file - promoters50/2991239
ccaaccaaaccaat

SEQ ID NO: 181624 - DNA, 14 bp, Unknown
  misc_feature (1)..( 14): Result.005 file - promoters50/2991239
aaaagaaaaaaaaa

SEQ ID NO: 181625 - DNA, 9 bp, Unknown
  misc_feature (1)..( 9): Result.005 file - promoters50/2991239
taaatacaa

SEQ ID NO: 181626 - DNA, 9 bp, Unknown
  misc_feature (1)..( 9): Result.005 file - promoters50/2991239
taattacag

SEQ ID NO: 181627 - DNA, 9 bp, Unknown
  misc_feature (1)..( 9): Result.005 file - promoters50/2991239
aaaatgcaa

SEQ ID NO: 181628 - DNA, 9 bp, Unknown
  misc_feature (1)..( 9): Result.005 file - promoters50/2991239
taaataaat

SEQ ID NO: 181629 - DNA, 9 bp, Unknown
  misc_feature (1)..( 9): Result.005 file - promoters50/2991239
taattagtc

SEQ ID NO: 181630 - DNA, 9 bp, Unknown
  misc_feature (1)..( 9): Result.005 file - promoters50/2991239
caattagcc

SEQ ID NO: 181631 - DNA, 29 bp, Unknown
  misc_feature (1)..( 29): Result.005 file - promoters50/2991239
agcttttaagtctctcgctagactgtcca

SEQ ID NO: 181632 - DNA, 29 bp, Unknown
  misc_feature (1)..( 29): Result.005 file - promoters50/2991239
aagctttaagtctatcgctagactgtcca

SEQ ID NO: 181633 - DNA, 29 bp, Unknown
  misc_feature (1)..( 29): Result.005 file - promoters50/2991239
agcatttaatgatgataacgatttggaag

SEQ ID NO: 181634 - DNA, 29 bp, Unknown
  misc_feature (1)..( 29): Result.005 file - promoters50/2991239
tcctcacacatctctctttcttccttctc

SEQ ID NO: 181635 - DNA, 29 bp, Unknown
  misc_feature (1)..( 29): Result.005 file - promoters50/2991239
atcatccaccgagatatcaagactgctaa

SEQ ID NO: 181636 - DNA, 29 bp, Unknown
  misc_feature (1)..( 29): Result.005 file - promoters50/2991239
gtagtttagtgaaacagaagctgacaaga

SEQ ID NO: 181637 - DNA, 34 bp, Unknown; identical to SEQ ID NO: 76979
  misc_feature (1)..( 34): Result.005 file - promoters50/2991239

SEQ ID NO: 181638 - DNA, 34 bp, Unknown; identical to SEQ ID NO: 76977
  misc_feature (1)..( 34): Result.005 file - promoters50/2991239

SEQ ID NO: 181639 - DNA, 34 bp, Unknown; identical to SEQ ID NO: 76978
  misc_feature (1)..( 34): Result.005 file - promoters50/2991239

SEQ ID NO: 181640 - DNA, 34 bp, Unknown; identical to SEQ ID NO: 104971
  misc_feature (1)..( 34): Result.005 file - promoters50/2991239

SEQ ID NO: 181641 - DNA, 34 bp, Unknown
  misc_feature (1)..( 34): Result.005 file - promoters50/2991239
attctctaataaataagtgaagattcatcgccaa

SEQ ID NO: 181642 - DNA, 34 bp, Unknown
  misc_feature (1)..( 34): Result.005 file - promoters50/2991239
gtgcctataaatatccttgagttttttatttcta

SEQ ID NO: 181643 - DNA, 13 bp, Unknown
  misc_feature (1)..( 13): Result.005 file - promoters50/2991239
tcattaaaaatca

SEQ ID NO: 181644 - DNA, 13 bp, Unknown
  misc_feature (1)..( 13): Result.005 file - promoters50/2991239
tcaataaatggaa

SEQ ID NO: 181645 - DNA, 13 bp, Unknown
  misc_feature (1)..( 13): Result.005 file - promoters50/2991239
tcagtaaaaaaaa

SEQ ID NO: 181646 - DNA, 13 bp, Unknown
  misc_feature (1)..( 13): Result.005 file - promoters50/2991239
attatatatgtga

SEQ ID NO: 181647 - DNA, 13 bp, Unknown
  misc_feature (1)..( 13): Result.005 file - promoters50/2991239
ccaataacccaaa

SEQ ID NO: 181648 - DNA, 13 bp, Unknown
  misc_feature (1)..( 13): Result.005 file - promoters50/2991239
ggaaaaaaaaaaa

SEQ ID NO: 181649 - DNA, 13 bp, Unknown
  misc_feature (1)..( 13): Result.005 file - promoters50/2991239
agaaaaaaaaaaa

SEQ ID NO: 181650 - DNA, 13 bp, Unknown
  misc_feature (1)..( 13): Result.005 file - promoters50/2991239
agtgtacaaaggg

SEQ ID NO: 181651 - DNA, 14 bp, Unknown
  misc_feature (1)..( 14): Result.005 file - promoters50/2991239
cataaaataagtga

SEQ ID NO: 181652 - DNA, 14 bp, Unknown
  misc_feature (1)..( 14): Result.005 file - promoters50/2991239
tttcaaataaatgg

SEQ ID NO: 181653 - DNA, 14 bp, Unknown
  misc_feature (1)..( 14): Result.005 file - promoters50/2991239
aataaaataaaatt

SEQ ID NO: 181654 - DNA, 14 bp, Unknown
  misc_feature (1)..( 14): Result.005 file - promoters50/2991239
agcaaaagaaatgg

SEQ ID NO: 181655 - DNA, 14 bp, Unknown
  misc_feature (1)..( 14): Result.005 file - promoters50/2991239
gtgaaaaaaaaaca

SEQ ID NO: 181656 - DNA, 14 bp, Unknown
  misc_feature (1)..( 14): Result.005 file - promoters50/2991239
agcaacagaagtag

SEQ ID NO: 181657 - DNA, 15 bp, Unknown
  misc_feature (1)..( 15): Result.005 file - promoters50/2991239
tcattaaaaatcaaa

SEQ ID NO: 181658 - DNA, 15 bp, Unknown
  misc_feature (1)..( 15): Result.005 file - promoters50/2991239
aaaaaaaaaatatca

SEQ ID NO: 181659 - DNA, 15 bp, Unknown
  misc_feature (1)..( 15): Result.005 file - promoters50/2991239
tcagtaaaaaaaaat

SEQ ID NO: 181660 - DNA, 15 bp, Unknown
  misc_feature (1)..( 15): Result.005 file - promoters50/2991239
aaaaaaaaaaacaaa

SEQ ID NO: 181661 - DNA, 15 bp, Unknown
  misc_feature (1)..( 15): Result.005 file - promoters50/2991239
tacaaaaaaaaaaaa

SEQ ID NO: 181662 - DNA, 15 bp, Unknown
  misc_feature (1)..( 15): Result.005 file - promoters50/2991239
agtgtacaaagggat

SEQ ID NO: 181663 - DNA, 15 bp, Unknown
  misc_feature (1)..( 15): Result.005 file - promoters50/2991239
gccaaccaaaccaat

SEQ ID NO: 181664 - DNA, 11 bp, Unknown
  misc_feature (1)..( 11): Result.005 file - promoters50/2991239
aaaaaaagcct

SEQ ID NO: 181665 - DNA, 11 bp, Unknown
  misc_feature (1)..( 11): Result.005 file - promoters50/2991239
caaaacagctt

SEQ ID NO: 181666 - DNA, 11 bp, Unknown
  misc_feature (1)..( 11): Result.005 file - promoters50/2991239
caaaaaagttt

SEQ ID NO: 181667 - DNA, 12 bp, Unknown
  misc_feature (1)..( 12): Result.005 file - promoters50/2991239
taaagaaagctc

SEQ ID NO: 181668 - DNA, 12 bp, Unknown
  misc_feature (1)..( 12): Result.005 file - promoters50/2991239
aaaaaaaaaaaa

SEQ ID NO: 181669 - DNA, 13 bp, Unknown
  misc_feature (1)..( 13): Result.005 file - promoters50/2991239
aaaaacaaatcag

SEQ ID NO: 181670 - DNA, 13 bp, Unknown
  misc_feature (1)..( 13): Result.005 file - promoters50/2991239
caaaccaataacc

SEQ ID NO: 181671 - DNA, 10 bp, Unknown
  misc_feature (1)..( 10): Result.005 file - promoters50/2991239
aaatacaaaa

SEQ ID NO: 181672 - DNA, 10 bp, Unknown
  misc_feature (1)..( 10): Result.005 file - promoters50/2991239
caaaacaaaa

SEQ ID NO: 181673 - DNA, 10 bp, Unknown
  misc_feature (1)..( 10): Result.005 file - promoters50/2991239
aaaaacaaat

SEQ ID NO: 181674 - DNA, 10 bp, Unknown
  misc_feature (1)..( 10): Result.005 file - promoters50/2991239
gtgtacaaag

SEQ ID NO: 181675 - DNA, 10 bp, Unknown
  misc_feature (1)..( 10): Result.005 file - promoters50/2991239
taaaaaaaaa

SEQ ID NO: 181676 - DNA, 10 bp, Unknown
  misc_feature (1)..( 10): Result.005 file - promoters50/2991239
ccaaaccaat

SEQ ID NO: 181677 - DNA, 8 bp, Unknown
  misc_feature (1)..( 8): Result.005 file - promoters50/2991333
aaaagaaa

SEQ ID NO: 181678 - DNA, 8 bp, Unknown
  misc_feature (1)..( 8): Result.005 file - promoters50/2991333
aaaataaa

SEQ ID NO: 181679 - DNA, 8 bp, Unknown
  misc_feature (1)..( 8): Result.005 file - promoters50/2991333
gtaataaa

SEQ ID NO: 181680 - DNA, 7 bp, Unknown
  misc_feature (1)..( 7): Result.005 file - promoters50/2991333
aatcaag

SEQ ID NO: 181681 - DNA, 7 bp, Unknown
  misc_feature (1)..( 7): Result.005 file - promoters50/2991333
aataaag

SEQ ID NO: 181682 - DNA, 7 bp, Unknown
  misc_feature (1)..( 7): Result.005 file - promoters50/2991333
aataaat

SEQ ID NO: 181683 - DNA, 8 bp, Unknown
  misc_feature (1)..( 8): Result.005 file - promoters50/2991371
aacaactt

SEQ ID NO: 181684 - DNA, 8 bp, Unknown
  misc_feature (1)..( 8): Result.005 file - promoters50/2991371
aacatctt

SEQ ID NO: 181685 - DNA, 8 bp, Unknown
  misc_feature (1)..( 8): Result.005 file - promoters50/2991371
atcatctt

SEQ ID NO: 181686 - DNA, 11 bp, Unknown
  misc_feature (1)..( 11): Result.005 file - promoters50/2991417
aaccaaaaaca

SEQ ID NO: 181687 - DNA, 11 bp, Unknown
  misc_feature (1)..( 11): Result.005 file - promoters50/2991417
taccaaatttt

SEQ ID NO: 181688 - DNA, 11 bp, Unknown
  misc_feature (1)..( 11): Result.005 file - promoters50/2991417
aactaaaaagt

SEQ ID NO: 181689 - DNA, 11 bp, Unknown
  misc_feature (1)..( 11): Result.005 file - promoters50/2991417
ctccaaacttt

SEQ ID NO: 181690 - DNA, 11 bp, Unknown
  misc_feature (1)..( 11): Result.005 file - promoters50/2991417
agctaacaaga

SEQ ID NO: 181691 - DNA, 9 bp, Unknown
  misc_feature (1)..( 9): Result.005 file - promoters50/2991417
ctatcatac

SEQ ID NO: 181692 - DNA, 9 bp, Unknown
  misc_feature (1)..( 9): Result.005 file - promoters50/2991417
gtatcttac

SEQ ID NO: 181693 - DNA, 9 bp, Unknown
  misc_feature (1)..( 9): Result.005 file - promoters50/2991417
ttattttat

SEQ ID NO: 181694 - DNA, 9 bp, Unknown
  misc_feature (1)..( 9): Result.005 file - promoters50/2991417
ttatttttg

SEQ ID NO: 181695 - DNA, 10 bp, Unknown
  misc_feature (1)..( 10): Result.005 file - promoters50/2991431
caaaattatt

SEQ ID NO: 181696 - DNA, 10 bp, Unknown
  misc_feature (1)..( 10): Result.005 file - promoters50/2991431
caaacttaac

SEQ ID NO: 181697 - DNA, 10 bp, Unknown
  misc_feature (1)..( 10): Result.005 file - promoters50/2991431
aagaatgatt

SEQ ID NO: 181698 - DNA, 7 bp, Unknown
  misc_feature (1)..( 7): Result.005 file - promoters50/2991431
aattaga

SEQ ID NO: 181699 - DNA, 7 bp, Unknown
  misc_feature (1)..( 7): Result.005 file - promoters50/2991431
aattagt

SEQ ID NO: 181700 - DNA, 7 bp, Unknown
  misc_feature (1)..( 7): Result.005 file - promoters50/2991431
gattaga

SEQ ID NO: 181701 - DNA, 11 bp, Unknown
  misc_feature (1)..( 11): Result.005 file - promoters50/2991431
ttgttaatctc

SEQ ID NO: 181702 - DNA, 11 bp, Unknown
  misc_feature (1)..( 11): Result.005 file - promoters50/2991431
gttttaaactc

SEQ ID NO: 181703 - DNA, 10 bp, Unknown
  misc_feature (1)..( 10): Result.005 file - promoters50/2991431
atttacactt

SEQ ID NO: 181704 - DNA, 11 bp, Unknown
  misc_feature (1)..( 11): Result.005 file - promoters50/2991431
gttataaatgt

SEQ ID NO: 181705 - DNA, 8 bp, Unknown
  misc_feature (1)..( 8): Result.005 file - promoters50/2991431
acacttta

SEQ ID NO: 181706 - DNA, 8 bp, Unknown
  misc_feature (1)..( 8): Result.005 file - promoters50/2991431
tgacttta

SEQ ID NO: 181707 - DNA, 9 bp, Unknown
  misc_feature (1)..( 9): Result.005 file - promoters50/2991431
gtacatttt

SEQ ID NO: 181708 - DNA, 9 bp, Unknown
  misc_feature (1)..( 9): Result.005 file - promoters50/2991431
ttagttaca

SEQ ID NO: 181709 - DNA, 9 bp, Unknown
  misc_feature (1)..( 9): Result.005 file - promoters50/2991431
ttatttaaa

SEQ ID NO: 181710 - DNA, 9 bp, Unknown
  misc_feature (1)..( 9): Result.005 file - promoters50/2991431
ttatatatt

SEQ ID NO: 181711 - DNA, 9 bp, Unknown
  misc_feature (1)..( 9): Result.005 file - promoters50/2991431
aattagaac

SEQ ID NO: 181712 - DNA, 9 bp, Unknown
  misc_feature (1)..( 9): Result.005 file - promoters50/2991431
atttagaaa

SEQ ID NO: 181713 - DNA, 10 bp, Unknown
  misc_feature (1)..( 10): Result.005 file - promoters50/2991431
atttaggaaa

SEQ ID NO: 181714 - DNA, 10 bp, Unknown
  misc_feature (1)..( 10): Result.005 file - promoters50/2991431
tgtttaatgt

SEQ ID NO: 181715 - DNA, 10 bp, Unknown
  misc_feature (1)..( 10): Result.005 file - promoters50/2991431
ctgttaatgg

SEQ ID NO: 181716 - DNA, 10 bp, Unknown
  misc_feature (1)..( 10): Result.005 file - promoters50/2991431
tgtttaatgt

SEQ ID NO: 181717 - DNA, 9 bp, Unknown
  misc_feature (1)..( 9): Result.005 file - promoters50/2991431
ttataaaaa

SEQ ID NO: 181718 - DNA, 9 bp, Unknown
  misc_feature (1)..( 9): Result.005 file - promoters50/2991431
ttataaaac

SEQ ID NO: 181719 - DNA, 9 bp, Unknown
  misc_feature (1)..( 9): Result.005 file - promoters50/2991431
ttgtaaaaa

SEQ ID NO: 181720 - DNA, 6 bp, Unknown
  misc_feature (1)..( 6): Result.005 file - promoters50/2991431
aaaaag

SEQ ID NO: 181721 - DNA, 6 bp, Unknown
  misc_feature (1)..( 6): Result.005 file - promoters50/2991431
aaaaag

SEQ ID NO: 181722 - DNA, 7 bp, Unknown
  misc_feature (1)..( 7): Result.005 file - promoters50/2991431
aaacaaa

SEQ ID NO: 181723 - DNA, 9 bp, Unknown
  misc_feature (1)..( 9): Result.005 file - promoters50/2991466
tcattttta

SEQ ID NO: 181724 - DNA, 9 bp, Unknown
  misc_feature (1)..( 9): Result.005 file - promoters50/2991466
tcaatttta

SEQ ID NO: 181725 - DNA, 9 bp, Unknown
  misc_feature (1)..( 9): Result.005 file - promoters50/2991466
tcattatta

SEQ ID NO: 181726 - DNA, 9 bp, Unknown
  misc_feature (1)..( 9): Result.005 file - promoters50/2991466
taaataata

SEQ ID NO: 181727 - DNA, 9 bp, Unknown
  misc_feature (1)..( 9): Result.005 file - promoters50/2991466
taactaaca

SEQ ID NO: 181728 - DNA, 9 bp, Unknown
  misc_feature (1)..( 9): Result.005 file - promoters50/2991466
gaaacaaat

SEQ ID NO: 181729 - DNA, 10 bp, Unknown
  misc_feature (1)..( 10): Result.005 file - promoters50/2991466
attattcaaa

SEQ ID NO: 181730 - DNA, 10 bp, Unknown
  misc_feature (1)..( 10): Result.005 file - promoters50/2991466
atttttcaaa

SEQ ID NO: 181731 - DNA, 10 bp, Unknown
  misc_feature (1)..( 10): Result.005 file - promoters50/2991466
atttttggaa

SEQ ID NO: 181732 - DNA, 6 bp, Unknown
  misc_feature (1)..( 6): Result.005 file - promoters50/2991466
aaaaat

SEQ ID NO: 181733 - DNA, 6 bp, Unknown
  misc_feature (1)..( 6): Result.005 file - promoters50/2991466
aaaaat

SEQ ID NO: 181734 - DNA, 6 bp, Unknown
  misc_feature (1)..( 6): Result.005 file - promoters50/2991466
aaaaaa

SEQ ID NO: 181735 - DNA, 10 bp, Unknown
  misc_feature (1)..( 10): Result.005 file - promoters50/2991489
tttgattaaa

SEQ ID NO: 181736 - DNA, 10 bp, Unknown
  misc_feature (1)..( 10): Result.005 file - promoters50/2991489
ttttattatt

SEQ ID NO: 181737 - DNA, 10 bp, Unknown
  misc_feature (1)..( 10): Result.005 file - promoters50/2991489
tgatattata

SEQ ID NO: 181738 - DNA, 10 bp, Unknown
  misc_feature (1)..( 10): Result.005 file - promoters50/2991489
gtttcttacg

SEQ ID NO: 181739 - DNA, 10 bp, Unknown
  misc_feature (1)..( 10): Result.005 file - promoters50/2991489
tcgtataatt

SEQ ID NO: 181740 - DNA, 10 bp, Unknown
  misc_feature (1)..( 10): Result.005 file - promoters50/2991489
actcataatt

SEQ ID NO: 181741 - DNA, 13 bp, Unknown
  misc_feature (1)..( 13): Result.005 file - promoters50/2991489
ttacttttattat

SEQ ID NO: 181742 - DNA, 13 bp, Unknown
  misc_feature (1)..( 13): Result.005 file - promoters50/2991489
ttacttttaacaa

SEQ ID NO: 181743 - DNA, 13 bp, Unknown
  misc_feature (1)..( 13): Result.005 file - promoters50/2991489
aggtttttatttc

SEQ ID NO: 181744 - DNA, 13 bp, Unknown
  misc_feature (1)..( 13): Result.005 file - promoters50/2991489
attctttttacag

SEQ ID NO: 181745 - DNA, 13 bp, Unknown
  misc_feature (1)..( 13): Result.005 file - promoters50/2991489
gagtttttttctt

SEQ ID NO: 181746 - DNA, 14 bp, Unknown
  misc_feature (1)..( 14): Result.005 file - promoters50/2991489
tcactttctatttg

SEQ ID NO: 181747 - DNA, 10 bp, Unknown
  misc_feature (1)..( 10): Result.005 file - promoters50/2991489
gttgttactt

SEQ ID NO: 181748 - DNA, 10 bp, Unknown
  misc_feature (1)..( 10): Result.005 file - promoters50/2991489
gtttttattt

SEQ ID NO: 181749 - DNA, 10 bp, Unknown
  misc_feature (1)..( 10): Result.005 file - promoters50/2991489
atttttactt

SEQ ID NO: 181750 - DNA, 10 bp, Unknown
  misc_feature (1)..( 10): Result.005 file - promoters50/2991489
ctttttacag

SEQ ID NO: 181751 - DNA, 10 bp, Unknown
  misc_feature (1)..( 10): Result.005 file - promoters50/2991489
tttttttctt

SEQ ID NO: 181752 - DNA, 10 bp, Unknown
  misc_feature (1)..( 10): Result.005 file - promoters50/2991489
ctttctattt

SEQ ID NO: 181753 - DNA, 7 bp, Unknown
  misc_feature (1)..( 7): Result.005 file - promoters50/2991507
gatcgag

SEQ ID NO: 181754 - DNA, 7 bp, Unknown
  misc_feature (1)..( 7): Result.005 file - promoters50/2991507
gatcgat

SEQ ID NO: 181755 - DNA, 7 bp, Unknown
  misc_feature (1)..( 7): Result.005 file - promoters50/2991507
gatggat

SEQ ID NO: 181756 - DNA, 7 bp, Unknown
  misc_feature (1)..( 7): Result.005 file - promoters50/2991507
tttcaca

SEQ ID NO: 181757 - DNA, 7 bp, Unknown
  misc_feature (1)..( 7): Result.005 file - promoters50/2991507
tttcact

SEQ ID NO: 181758 - DNA, 7 bp, Unknown
  misc_feature (1)..( 7): Result.005 file - promoters50/2991507
ttttaca

SEQ ID NO: 181759 - DNA, 8 bp, Unknown
  misc_feature (1)..( 8): Result.005 file - promoters50/2991507
tgttttta

SEQ ID NO: 181760 - DNA, 8 bp, Unknown
  misc_feature (1)..( 8): Result.005 file - promoters50/2991507
tgtttttt

SEQ ID NO: 181761 - DNA, 9 bp, Unknown
  misc_feature (1)..( 9): Result.005 file - promoters50/2991507
gatttatta

SEQ ID NO: 181762 - DNA, 14 bp, Unknown
  misc_feature (1)..( 14): Result.005 file - promoters50/2991507
atcaactaattttc

SEQ ID NO: 181763 - DNA, 14 bp, Unknown
  misc_feature (1)..( 14): Result.005 file - promoters50/2991507
ttttactaactttc

SEQ ID NO: 181764 - DNA, 14 bp, Unknown
  misc_feature (1)..( 14): Result.005 file - promoters50/2991507
ttttaataacagga

SEQ ID NO: 181765 - DNA, 7 bp, Unknown
  misc_feature (1)..( 7): Result.005 file - promoters50/2991507
taaaatt

SEQ ID NO: 181766 - DNA, 7 bp, Unknown
  misc_feature (1)..( 7): Result.005 file - promoters50/2991507
taaaatc

SEQ ID NO: 181767 - DNA, 7 bp, Unknown
  misc_feature (1)..( 7): Result.005 file - promoters50/2991507
caaaatc

SEQ ID NO: 181768 - DNA, 9 bp, Unknown
  misc_feature (1)..( 9): Result.005 file - promoters50/2991515
tcaagttcg

SEQ ID NO: 181769 - DNA, 9 bp, Unknown
  misc_feature (1)..( 9): Result.005 file - promoters50/2991515
tcatgttct

SEQ ID NO: 181770 - DNA, 9 bp, Unknown
  misc_feature (1)..( 9): Result.005 file - promoters50/2991515
tcttgttct

SEQ ID NO: 181771 - DNA, 8 bp, Unknown
  misc_feature (1)..( 8): Result.005 file - promoters50/2991515
tatggttt

SEQ ID NO: 181772 - DNA, 8 bp, Unknown
  misc_feature (1)..( 8): Result.005 file - promoters50/2991515
tatagttt

SEQ ID NO: 181773 - DNA, 8 bp, Unknown
  misc_feature (1)..( 8): Result.005 file - promoters50/2991515
aatggttg

SEQ ID NO: 181774 - DNA, 13 bp, Unknown
  misc_feature (1)..( 13): Result.005 file - promoters50/2991515
aattgttttttgc

SEQ ID NO: 181775 - DNA, 13 bp, Unknown
  misc_feature (1)..( 13): Result.005 file - promoters50/2991515
gtaaattttttgt

SEQ ID NO: 181776 - DNA, 13 bp, Unknown
  misc_feature (1)..( 13): Result.005 file - promoters50/2991515
ttttgtttttgta

SEQ ID NO: 181777 - DNA, 13 bp, Unknown
  misc_feature (1)..( 13): Result.005 file - promoters50/2991515
ataatgtttatgc

SEQ ID NO: 181778 - DNA, 9 bp, Unknown
  misc_feature (1)..( 9): Result.005 file - promoters50/2991515
agaaaaagt

SEQ ID NO: 181779 - DNA, 9 bp, Unknown
  misc_feature (1)..( 9): Result.005 file - promoters50/2991515
ttaaacagt

SEQ ID NO: 181780 - DNA, 9 bp, Unknown
  misc_feature (1)..( 9): Result.005 file - promoters50/2991515
agaaacagt

SEQ ID NO: 181781 - DNA, 11 bp, Unknown
  misc_feature (1)..( 11): Result.005 file - promoters50/2991515
aattaaatact

SEQ ID NO: 181782 - DNA, 11 bp, Unknown
  misc_feature (1)..( 11): Result.005 file - promoters50/2991515
aataaaaaact

SEQ ID NO: 181783 - DNA, 11 bp, Unknown
  misc_feature (1)..( 11): Result.005 file - promoters50/2991515
aattaaaatta

SEQ ID NO: 181784 - DNA, 7 bp, Unknown
  misc_feature (1)..( 7): Result.005 file - promoters50/2991515
tttgata

SEQ ID NO: 181785 - DNA, 7 bp, Unknown
  misc_feature (1)..( 7): Result.005 file - promoters50/2991515
tttaata

SEQ ID NO: 181786 - DNA, 7 bp, Unknown
  misc_feature (1)..( 7): Result.005 file - promoters50/2991515
tttaatt

SEQ ID NO: 181787 - DNA, 11 bp, Unknown
  misc_feature (1)..( 11): Result.005 file - promoters50/2991515
aacaaattcat

SEQ ID NO: 181788 - DNA, 11 bp, Unknown
  misc_feature (1)..( 11): Result.005 file - promoters50/2991515
tataaattcat

SEQ ID NO: 181789 - DNA, 11 bp, Unknown
  misc_feature (1)..( 11): Result.005 file - promoters50/2991515
tatatattaac

SEQ ID NO: 181790 - DNA, 8 bp, Unknown
  misc_feature (1)..( 8): Result.005 file - promoters50/2991515
agttttat

SEQ ID NO: 181791 - DNA, 8 bp, Unknown
  misc_feature (1)..( 8): Result.005 file - promoters50/2991515
tgttctat

SEQ ID NO: 181792 - DNA, 8 bp, Unknown
  misc_feature (1)..( 8): Result.005 file - promoters50/2991515
tgttctct

SEQ ID NO: 181793 - DNA, 11 bp, Unknown
  misc_feature (1)..( 11): Result.005 file - promoters50/2991515
atgttttgttg

SEQ ID NO: 181794 - DNA, 11 bp, Unknown
  misc_feature (1)..( 11): Result.005 file - promoters50/2991515
ctttttttttg

SEQ ID NO: 181795 - DNA, 12 bp, Unknown
  misc_feature (1)..( 12): Result.005 file - promoters50/2991515
tctttttatttg

SEQ ID NO: 181796 - DNA, 8 bp, Unknown
  misc_feature (1)..( 8): Result.005 file - promoters50/2991515
gaaacatt

SEQ ID NO: 181797 - DNA, 8 bp, Unknown
  misc_feature (1)..( 8): Result.005 file - promoters50/2991515
caaaaatt

SEQ ID NO: 181798 - DNA, 8 bp, Unknown
  misc_feature (1)..( 8): Result.005 file - promoters50/2991515
gaatcata

SEQ ID NO: 181799 - DNA, 8 bp, Unknown
  misc_feature (1)..( 8): Result.005 file - promoters50/2991944
aatacatt

SEQ ID NO: 181800 - DNA, 8 bp, Unknown
  misc_feature (1)..( 8): Result.005 file - promoters50/2991944
aataaatt

SEQ ID NO: 181801 - DNA, 8 bp, Unknown
  misc_feature (1)..( 8): Result.005 file - promoters50/2991944
aattaatt

SEQ ID NO: 181802 - DNA, 11 bp, Unknown
  misc_feature (1)..( 11): Result.005 file - promoters50/2991944
acatgataagc

SEQ ID NO: 181803 - DNA, 11 bp, Unknown
  misc_feature (1)..( 11): Result.005 file - promoters50/2991944
acataataata

SEQ ID NO: 181804 - DNA, 11 bp, Unknown
  misc_feature (1)..( 11): Result.005 file - promoters50/2991944
ttctgaaaagc

SEQ ID NO: 181805 - DNA, 10 bp, Unknown
  misc_feature (1)..( 10): Result.005 file - promoters50/2991944
aaaagtctaa

SEQ ID NO: 181806 - DNA, 10 bp, Unknown
  misc_feature (1)..( 10): Result.005 file - promoters50/2991944
aaaattctaa

SEQ ID NO: 181807 - DNA, 10 bp, Unknown
  misc_feature (1)..( 10): Result.005 file - promoters50/2991944
gcgtgtctaa

SEQ ID NO: 181808 - DNA, 8 bp, Unknown
  misc_feature (1)..( 8): Result.005 file - promoters50/2991944
ggcccaga

SEQ ID NO: 181809 - DNA, 8 bp, Unknown
  misc_feature (1)..( 8): Result.005 file - promoters50/2991944
ggcccatt

SEQ ID NO: 181810 - DNA, 8 bp, Unknown
  misc_feature (1)..( 8): Result.005 file - promoters50/2991944
agcccatt

SEQ ID NO: 181811 - DNA, 8 bp, Unknown
  misc_feature (1)..( 8): Result.005 file - promoters50/2991944
ttcgttac

SEQ ID NO: 181812 - DNA, 8 bp, Unknown
  misc_feature (1)..( 8): Result.005 file - promoters50/2991944
ttcattac

SEQ ID NO: 181813 - DNA, 8 bp, Unknown
  misc_feature (1)..( 8): Result.005 file - promoters50/2991944
gtcattaa

SEQ ID NO: 181814 - DNA, 9 bp, Unknown
  misc_feature (1)..( 9): Result.005 file - promoters50/2991944
tttaatatt

SEQ ID NO: 181815 - DNA, 9 bp, Unknown
  misc_feature (1)..( 9): Result.005 file - promoters50/2991944
tttactata

SEQ ID NO: 181816 - DNA, 9 bp, Unknown
  misc_feature (1)..( 9): Result.005 file - promoters50/2991944
gttattatt

SEQ ID NO: 181817 - DNA, 10 bp, Unknown
  misc_feature (1)..( 10): Result.005 file - promoters50/2991944
aaaaattaaa

SEQ ID NO: 181818 - DNA, 10 bp, Unknown
  misc_feature (1)..( 10): Result.005 file - promoters50/2991944
ccaaattaac

SEQ ID NO: 181819 - DNA, 10 bp, Unknown
  misc_feature (1)..( 10): Result.005 file - promoters50/2991944
tcaaataatt

SEQ ID NO: 181820 - DNA, 9 bp, Unknown
  misc_feature (1)..( 9): Result.005 file - promoters50/2991944
taaatcaca

SEQ ID NO: 181821 - DNA, 9 bp, Unknown
  misc_feature (1)..( 9): Result.005 file - promoters50/2991944
ataattaca

SEQ ID NO: 181822 - DNA, 9 bp, Unknown
  misc_feature (1)..( 9): Result.005 file - promoters50/2991944
atacttatt

SEQ ID NO: 181823 - DNA, 10 bp, Unknown
  misc_feature (1)..( 10): Result.005 file - promoters50/2991944
aataactgat

SEQ ID NO: 181824 - DNA, 10 bp, Unknown
  misc_feature (1)..( 10): Result.005 file - promoters50/2991944
aataaatgat

SEQ ID NO: 181825 - DNA, 10 bp, Unknown
  misc_feature (1)..( 10): Result.005 file - promoters50/2991944
attaacaaaa

SEQ ID NO: 181826 - DNA, 7 bp, Unknown
  misc_feature (1)..( 7): Result.005 file - promoters50/2991955
attgatt

SEQ ID NO: 181827 - DNA, 7 bp, Unknown
  misc_feature (1)..( 7): Result.005 file - promoters50/2991955
attaatt

SEQ ID NO: 181828 - DNA, 7 bp, Unknown
  misc_feature (1)..( 7): Result.005 file - promoters50/2991955
attaatg

SEQ ID NO: 181829 - DNA, 11 bp, Unknown
  misc_feature (1)..( 11): Result.005 file - promoters50/2991974
agttgtttttt

SEQ ID NO: 181830 - DNA, 11 bp, Unknown
  misc_feature (1)..( 11): Result.005 file - promoters50/2991974
tgttttttttt

SEQ ID NO: 181831 - DNA, 11 bp, Unknown
  misc_feature (1)..( 11): Result.005 file - promoters50/2991974
agtggttggga

SEQ ID NO: 181832 - DNA, 12 bp, Unknown
  misc_feature (1)..( 12): Result.005 file - promoters50/2992000
attggaaaggta

SEQ ID NO: 181833 - DNA, 12 bp, Unknown
  misc_feature (1)..( 12): Result.005 file - promoters50/2992000
atttgaaagaca

SEQ ID NO: 181834 - DNA, 12 bp, Unknown
  misc_feature (1)..( 12): Result.005 file - promoters50/2992000
ttgggaaaaaca

SEQ ID NO: 181835 - DNA, 7 bp, Unknown
  misc_feature (1)..( 7): Result.005 file - promoters50/2992181
ttaaaat

SEQ ID NO: 181836 - DNA, 7 bp, Unknown
  misc_feature (1)..( 7): Result.005 file - promoters50/2992181
ttaaaag

SEQ ID NO: 181837 - DNA, 7 bp, Unknown
  misc_feature (1)..( 7): Result.005 file - promoters50/2992181
ttacaat

SEQ ID NO: 181838 - DNA, 7 bp, Unknown
  misc_feature (1)..( 7): Result.005 file - promoters50/2992181
tttatct

SEQ ID NO: 181839 - DNA, 7 bp, Unknown
  misc_feature (1)..( 7): Result.005 file - promoters50/2992181
gttatct

SEQ ID NO: 181840 - DNA, 7 bp, Unknown
  misc_feature (1)..( 7): Result.005 file - promoters50/2992181
gttttct

SEQ ID NO: 181841 - DNA, 8 bp, Unknown
  misc_feature (1)..( 8): Result.005 file - promoters50/2992181
cttatgta

SEQ ID NO: 181842 - DNA, 8 bp, Unknown
  misc_feature (1)..( 8): Result.005 file - promoters50/2992181
tttacgta

SEQ ID NO: 181843 - DNA, 9 bp, Unknown
  misc_feature (1)..( 9): Result.005 file - promoters50/2992181
tttaacgtt

SEQ ID NO: 181844 - DNA, 9 bp, Unknown
  misc_feature (1)..( 9): Result.005 file - promoters50/2992181
cataataat

SEQ ID NO: 181845 - DNA, 9 bp, Unknown
  misc_feature (1)..( 9): Result.005 file - promoters50/2992181
gataaaaat

SEQ ID NO: 181846 - DNA, 9 bp, Unknown
  misc_feature (1)..( 9): Result.005 file - promoters50/2992181
aattatacc

SEQ ID NO: 181847 - DNA, 7 bp, Unknown
  misc_feature (1)..( 7): Result.005 file - promoters50/2992181
aactaat

SEQ ID NO: 181848 - DNA, 7 bp, Unknown
  misc_feature (1)..( 7): Result.005 file - promoters50/2992181
aacaaat

SEQ ID NO: 181849 - DNA, 7 bp, Unknown
  misc_feature (1)..( 7): Result.005 file - promoters50/2992181
aacaaag

SEQ ID NO: 181850 - DNA, 8 bp, Unknown
  misc_feature (1)..( 8): Result.005 file - promoters50/2992181
gaagccaa

SEQ ID NO: 181851 - DNA, 8 bp, Unknown
  misc_feature (1)..( 8): Result.005 file - promoters50/2992181
aaagacaa

SEQ ID NO: 181852 - DNA, 8 bp, Unknown
  misc_feature (1)..( 8): Result.005 file - promoters50/2992181
aaaaacaa

SEQ ID NO: 181853 - DNA, 9 bp, Unknown
  misc_feature (1)..( 9): Result.005 file - promoters50/2992316
tttatcatt

SEQ ID NO: 181854 - DNA, 9 bp, Unknown
  misc_feature (1)..( 9): Result.005 file - promoters50/2992316
tctatcatc

SEQ ID NO: 181855 - DNA, 9 bp, Unknown
  misc_feature (1)..( 9): Result.005 file - promoters50/2992316
catattatt

SEQ ID NO: 181856 - DNA, 9 bp, Unknown
  misc_feature (1)..( 9): Result.005 file - promoters50/2992316
catattacc

SEQ ID NO: 181857 - DNA, 11 bp, Unknown
  misc_feature (1)..( 11): Result.005 file - promoters50/2992316
tcccccatgag

SEQ ID NO: 181858 - DNA, 11 bp, Unknown
  misc_feature (1)..( 11): Result.005 file - promoters50/2992316
tccaccattca

SEQ ID NO: 181859 - DNA, 11 bp, Unknown
  misc_feature (1)..( 11): Result.005 file - promoters50/2992316
ccaaccaatca

SEQ ID NO: 181860 - DNA, 11 bp, Unknown
  misc_feature (1)..( 11): Result.005 file - promoters50/2992316
acaaacattgt

SEQ ID NO: 181861 - DNA, 21 bp, Unknown
  misc_feature (1)..( 21): Result.005 file - promoters50/2992349
attgtgtgcatttgtatgaag

SEQ ID NO: 181862 - DNA, 21 bp, Unknown
  misc_feature (1)..( 21): Result.005 file - promoters50/2992349
tttttgatcatttgtggcagc

SEQ ID NO: 181863 - DNA, 21 bp, Unknown
  misc_feature (1)..( 21): Result.005 file - promoters50/2992349
atacatttcatatgtttccaa

SEQ ID NO: 181864 - DNA, 21 bp, Unknown
  misc_feature (1)..( 21): Result.005 file - promoters50/2992349
aaaaacaaaatttctatcatt

SEQ ID NO: 181865 - DNA, 21 bp, Unknown
  misc_feature (1)..( 21): Result.005 file - promoters50/2992349
aatttcactttttctataaag

SEQ ID NO: 181866 - DNA, 21 bp, Unknown
  misc_feature (1)..( 21): Result.005 file - promoters50/2992349
aaaaaccaaatttcaataacc

SEQ ID NO: 181867 - DNA, 21 bp, Unknown
  misc_feature (1)..( 21): Result.005 file - promoters50/2992349
tgtggtaaaacttctatccat

SEQ ID NO: 181868 - DNA, 11 bp, Unknown
  misc_feature (1)..( 11): Result.005 file - promoters50/2992349
ggaactaaaaa

SEQ ID NO: 181869 - DNA, 11 bp, Unknown
  misc_feature (1)..( 11): Result.005 file - promoters50/2992349
ccaactaaagt

SEQ ID NO: 181870 - DNA, 11 bp, Unknown
  misc_feature (1)..( 11): Result.005 file - promoters50/2992349
ttaacaaaaaa

SEQ ID NO: 181871 - DNA, 11 bp, Unknown
  misc_feature (1)..( 11): Result.005 file - promoters50/2992349
caaacaaaacc

SEQ ID NO: 181872 - DNA, 11 bp, Unknown
  misc_feature (1)..( 11): Result.005 file - promoters50/2992349
aaaaataaata

SEQ ID NO: 181873 - DNA, 11 bp, Unknown
  misc_feature (1)..( 11): Result.005 file - promoters50/2992349
acaaaaaaaat

SEQ ID NO: 181874 - DNA, 11 bp, Unknown
  misc_feature (1)..( 11): Result.005 file - promoters50/2992349
ttaccaaaaat

SEQ ID NO: 181875 - DNA, 9 bp, Unknown
  misc_feature (1)..( 9): Result.005 file - promoters50/2992349
tcacaaatc

SEQ ID NO: 181876 - DNA, 9 bp, Unknown
  misc_feature (1)..( 9): Result.005 file - promoters50/2992349
aaacaaatc

SEQ ID NO: 181877 - DNA, 9 bp, Unknown
  misc_feature (1)..( 9): Result.005 file - promoters50/2992349
gtacaaata

SEQ ID NO: 181878 - DNA, 9 bp, Unknown
  misc_feature (1)..( 9): Result.005 file - promoters50/2992349
tcataaata

SEQ ID NO: 181879 - DNA, 9 bp, Unknown
  misc_feature (1)..( 9): Result.005 file - promoters50/2992349
tattaaata

SEQ ID NO: 181880 - DNA, 9 bp, Unknown
  misc_feature (1)..( 9): Result.005 file - promoters50/2992349
ttatatata

SEQ ID NO: 181881 - DNA, 14 bp, Unknown
  misc_feature (1)..( 14): Result.005 file - promoters50/2992349
ttttacaaagttta

SEQ ID NO: 181882 - DNA, 14 bp, Unknown
  misc_feature (1)..( 14): Result.005 file - promoters50/2992349
aaaaacaaaatttc

SEQ ID NO: 181883 - DNA, 14 bp, Unknown
  misc_feature (1)..( 14): Result.005 file - promoters50/2992349
ttcagtaaaatttc

SEQ ID NO: 181884 - DNA, 14 bp, Unknown
  misc_feature (1)..( 14): Result.005 file - promoters50/2992349
aaaaaccaaatttc

SEQ ID NO: 181885 - DNA, 14 bp, Unknown
  misc_feature (1)..( 14): Result.005 file - promoters50/2992349
tgtggtaaaacttc

SEQ ID NO: 181886 - DNA, 14 bp, Unknown
  misc_feature (1)..( 14): Result.005 file - promoters50/2992349
tcaaagaaagaaac

SEQ ID NO: 181887 - DNA, 14 bp, Unknown
  misc_feature (1)..( 14): Result.005 file - promoters50/2992349
aaaattaaaatcaa

SEQ ID NO: 181888 - DNA, 10 bp, Unknown
  misc_feature (1)..( 10): Result.005 file - promoters50/2992349
aacacataat

SEQ ID NO: 181889 - DNA, 10 bp, Unknown
  misc_feature (1)..( 10): Result.005 file - promoters50/2992349
tacaaataaa

SEQ ID NO: 181890 - DNA, 10 bp, Unknown
  misc_feature (1)..( 10): Result.005 file - promoters50/2992349
ttaaaataca

SEQ ID NO: 181891 - DNA, 10 bp, Unknown
  misc_feature (1)..( 10): Result.005 file - promoters50/2992349
caaaactaca

SEQ ID NO: 181892 - DNA, 10 bp, Unknown
  misc_feature (1)..( 10): Result.005 file - promoters50/2992349
agaaaatagt

SEQ ID NO: 181893 - DNA, 10 bp, Unknown
  misc_feature (1)..( 10): Result.005 file - promoters50/2992349
agagaatggc

SEQ ID NO: 181894 - DNA, 12 bp, Unknown
  misc_feature (1)..( 12): Result.005 file - promoters50/2992349
tttttataaaaa

SEQ ID NO: 181895 - DNA, 12 bp, Unknown
  misc_feature (1)..( 12): Result.005 file - promoters50/2992349
tgtatattaaat

SEQ ID NO: 181896 - DNA, 12 bp, Unknown
  misc_feature (1)..( 12): Result.005 file - promoters50/2992349
attatataaaca

SEQ ID NO: 181897 - DNA, 12 bp, Unknown
  misc_feature (1)..( 12): Result.005 file - promoters50/2992349
attatatataga

SEQ ID NO: 181898 - DNA, 12 bp, Unknown
  misc_feature (1)..( 12): Result.005 file - promoters50/2992349
ccagaattaaac

SEQ ID NO: 181899 - DNA, 12 bp, Unknown
  misc_feature (1)..( 12): Result.005 file - promoters50/2992349
atctcataaata

SEQ ID NO: 181900 - DNA, 16 bp, Unknown
  misc_feature (1)..( 16): Result.005 file - promoters50/2992349
ctaaaaagtatttttg

SEQ ID NO: 181901 - DNA, 16 bp, Unknown
  misc_feature (1)..( 16): Result.005 file - promoters50/2992349
ctaaaaacaaaatttc

SEQ ID NO: 181902 - DNA, 16 bp, Unknown
  misc_feature (1)..( 16): Result.005 file - promoters50/2992349
acaaaaaccaaatttc

SEQ ID NO: 181903 - DNA, 16 bp, Unknown
  misc_feature (1)..( 16): Result.005 file - promoters50/2992349
ggtaaaacttctatcc

SEQ ID NO: 181904 - DNA, 16 bp, Unknown
  misc_feature (1)..( 16): Result.005 file - promoters50/2992349
ttaaaatcaagaatac

SEQ ID NO: 181905 - DNA, 16 bp, Unknown
  misc_feature (1)..( 16): Result.005 file - promoters50/2992349
gtaaaatttcactttt

SEQ ID NO: 181906 - DNA, 13 bp, Unknown
  misc_feature (1)..( 13): Result.005 file - promoters50/2992349
attctacataatt

SEQ ID NO: 181907 - DNA, 13 bp, Unknown
  misc_feature (1)..( 13): Result.005 file - promoters50/2992349
catttacatcatt

SEQ ID NO: 181908 - DNA, 13 bp, Unknown
  misc_feature (1)..( 13): Result.005 file - promoters50/2992349
aaactacatattc

SEQ ID NO: 181909 - DNA, 13 bp, Unknown
  misc_feature (1)..( 13): Result.005 file - promoters50/2992349
aaaatacagctgt

SEQ ID NO: 181910 - DNA, 13 bp, Unknown
  misc_feature (1)..( 13): Result.005 file - promoters50/2992349
aaaatagtgttaa

SEQ ID NO: 181911 - DNA, 13 bp, Unknown
  misc_feature (1)..( 13): Result.005 file - promoters50/2992349
ataatagagaatg

SEQ ID NO: 181912 - DNA, 15 bp, Unknown
  misc_feature (1)..( 15): Result.005 file - promoters50/2992349
aaaaaccaaatttca

SEQ ID NO: 181913 - DNA, 15 bp, Unknown
  misc_feature (1)..( 15): Result.005 file - promoters50/2992349
taaaatcaagaatac

SEQ ID NO: 181914 - DNA, 15 bp, Unknown
  misc_feature (1)..( 15): Result.005 file - promoters50/2992349
taaaaacaaaatttc

SEQ ID NO: 181915 - DNA, 15 bp, Unknown
  misc_feature (1)..( 15): Result.005 file - promoters50/2992349
ttcaaagaaagaaac

SEQ ID NO: 181916 - DNA, 15 bp, Unknown
  misc_feature (1)..( 15): Result.005 file - promoters50/2992349
tgaaaaaaaaatgtg

SEQ ID NO: 181917 - DNA, 15 bp, Unknown
  misc_feature (1)..( 15): Result.005 file - promoters50/2992349
taaaatttcactttt

SEQ ID NO: 181918 - DNA, 11 bp, Unknown
  misc_feature (1)..( 11): Result.005 file - promoters50/2992396
cgccacaccaa

SEQ ID NO: 181919 - DNA, 11 bp, Unknown
  misc_feature (1)..( 11): Result.005 file - promoters50/2992396
agccacaagcg

SEQ ID NO: 181920 - DNA, 11 bp, Unknown
  misc_feature (1)..( 11): Result.005 file - promoters50/2992396
agctacaggcg

SEQ ID NO: 181921 - DNA, 11 bp, Unknown
  misc_feature (1)..( 11): Result.005 file - promoters50/2992722
cattattaatt

SEQ ID NO: 181922 - DNA, 11 bp, Unknown
  misc_feature (1)..( 11): Result.005 file - promoters50/2992722
ttgtataaatt

SEQ ID NO: 181923 - DNA, 11 bp, Unknown
  misc_feature (1)..( 11): Result.005 file - promoters50/2992722
atttactaaaa

SEQ ID NO: 181924 - DNA, 11 bp, Unknown
  misc_feature (1)..( 11): Result.005 file - promoters50/2992722
ttgtataaaat

SEQ ID NO: 181925 - DNA, 11 bp, Unknown
  misc_feature (1)..( 11): Result.005 file - promoters50/2992722
ttgtatattag

SEQ ID NO: 181926 - DNA, 12 bp, Unknown
  misc_feature (1)..( 12): Result.005 file - promoters50/2992722
gagaactgaaag

SEQ ID NO: 181927 - DNA, 12 bp, Unknown
  misc_feature (1)..( 12): Result.005 file - promoters50/2993154
cattttaaaatt

SEQ ID NO: 181928 - DNA, 12 bp, Unknown
  misc_feature (1)..( 12): Result.005 file - promoters50/2993154
cattctaaagaa

SEQ ID NO: 181929 - DNA, 12 bp, Unknown
  misc_feature (1)..( 12): Result.005 file - promoters50/2993154
cagcctaaggaa

SEQ ID NO: 181930 - DNA, 10 bp, Unknown
  misc_feature (1)..( 10): Result.005 file - promoters50/2993154
ccaagatctt

SEQ ID NO: 181931 - DNA, 10 bp, Unknown
  misc_feature (1)..( 10): Result.005 file - promoters50/2993154
taaagaactt

SEQ ID NO: 181932 - DNA, 11 bp, Unknown
  misc_feature (1)..( 11): Result.005 file - promoters50/2993154
ctaaggaagag

SEQ ID NO: 181933 - DNA, 8 bp, Unknown
  misc_feature (1)..( 8): Result.005 file - promoters50/2993154
tttaattt

SEQ ID NO: 181934 - DNA, 8 bp, Unknown
  misc_feature (1)..( 8): Result.005 file - promoters50/2993154
attaattt

SEQ ID NO: 181935 - DNA, 9 bp, Unknown
  misc_feature (1)..( 9): Result.005 file - promoters50/2993154
gttcaatga

SEQ ID NO: 181936 - DNA, 9 bp, Unknown
  misc_feature (1)..( 9): Result.005 file - promoters50/2993154
atttgaagg

SEQ ID NO: 181937 - DNA, 9 bp, Unknown
  misc_feature (1)..( 9): Result.005 file - promoters50/2993154
ttttcaagt

SEQ ID NO: 181938 - DNA, 9 bp, Unknown
  misc_feature (1)..( 9): Result.005 file - promoters50/2993154
ttttcaagt

SEQ ID NO: 181939 - DNA, 9 bp, Unknown
  misc_feature (1)..( 9): Result.005 file - promoters50/2993154
aaattagat

SEQ ID NO: 181940 - DNA, 9 bp, Unknown
  misc_feature (1)..( 9): Result.005 file - promoters50/2993154
gcattagac

SEQ ID NO: 181941 - DNA, 9 bp, Unknown
  misc_feature (1)..( 9): Result.005 file - promoters50/2993154
aaaatagat

SEQ ID NO: 181942 - DNA, 7 bp, Unknown
  misc_feature (1)..( 7): Result.005 file - promoters50/2993154
atttttt

SEQ ID NO: 181943 - DNA, 7 bp, Unknown
  misc_feature (1)..( 7): Result.005 file - promoters50/2993154
attattt

SEQ ID NO: 181944 - DNA, 7 bp, Unknown
  misc_feature (1)..( 7): Result.005 file - promoters50/2993154
attatta

SEQ ID NO: 181945 - DNA, 13 bp, Unknown
  misc_feature (1)..( 13): Result.005 file - promoters50/2993154
aattacaaataaa

SEQ ID NO: 181946 - DNA, 13 bp, Unknown
  misc_feature (1)..( 13): Result.005 file - promoters50/2993154
aattaaaaaaaaa

SEQ ID NO: 181947 - DNA, 13 bp, Unknown
  misc_feature (1)..( 13): Result.005 file - promoters50/2993154
aagtgttaataaa

SEQ ID NO: 181948 - DNA, 9 bp, Unknown
  misc_feature (1)..( 9): Result.005 file - promoters50/2993240
aatttaaac

SEQ ID NO: 181949 - DNA, 9 bp, Unknown
  misc_feature (1)..( 9): Result.005 file - promoters50/2993240
aattttaac

SEQ ID NO: 181950 - DNA, 9 bp, Unknown
  misc_feature (1)..( 9): Result.005 file - promoters50/2993240
aatataaaa

SEQ ID NO: 181951 - DNA, 6 bp, Unknown
  misc_feature (1)..( 6): Result.005 file - promoters50/2993240
aaccgt

SEQ ID NO: 181952 - DNA, 6 bp, Unknown
  misc_feature (1)..( 6): Result.005 file - promoters50/2993240
aaccgt

SEQ ID NO: 181953 - DNA, 6 bp, Unknown
  misc_feature (1)..( 6): Result.005 file - promoters50/2993240
aaccgt

SEQ ID NO: 181954 - DNA, 8 bp, Unknown
  misc_feature (1)..( 8): Result.005 file - promoters50/2993642
gatttttt

SEQ ID NO: 181955 - DNA, 8 bp, Unknown
  misc_feature (1)..( 8): Result.005 file - promoters50/2993642
tattttta

SEQ ID NO: 181956 - DNA, 9 bp, Unknown
  misc_feature (1)..( 9): Result.005 file - promoters50/2993642
gattctttg

SEQ ID NO: 181957 - DNA, 9 bp, Unknown
  misc_feature (1)..( 9): Result.005 file - promoters50/2993642
gattcttac

SEQ ID NO: 181958 - DNA, 9 bp, Unknown
  misc_feature (1)..( 9): Result.005 file - promoters50/2993642
gatttttct

SEQ ID NO: 181959 - DNA, 9 bp, Unknown
  misc_feature (1)..( 9): Result.005 file - promoters50/2993642
cattcgtac

SEQ ID NO: 181960 - DNA, 9 bp, Unknown
  misc_feature (1)..( 9): Result.005 file - promoters50/2993642
aaatctttg

SEQ ID NO: 181961 - DNA, 15 bp, Unknown
  misc_feature (1)..( 15): Result.005 file - promoters50/2993642
aaaaaactattgggg

SEQ ID NO: 181962 - DNA, 15 bp, Unknown
  misc_feature (1)..( 15): Result.005 file - promoters50/2993642
aataaaatatttaaa

SEQ ID NO: 181963 - DNA, 15 bp, Unknown
  misc_feature (1)..( 15): Result.005 file - promoters50/2993642
aataaagtatttaaa

SEQ ID NO: 181964 - DNA, 15 bp, Unknown
  misc_feature (1)..( 15): Result.005 file - promoters50/2993642
aacaaaaaaattgaa

SEQ ID NO: 181965 - DNA, 15 bp, Unknown
  misc_feature (1)..( 15): Result.005 file - promoters50/2993642
tatcgtctatttaaa

SEQ ID NO: 181966 - DNA, 15 bp, Unknown
  misc_feature (1)..( 15): Result.005 file - promoters50/2993642
agaaaaagattgtgt

SEQ ID NO: 181967 - DNA, 8 bp, Unknown
  misc_feature (1)..( 8): Result.005 file - promoters50/2994131
gcattaga

SEQ ID NO: 181968 - DNA, 8 bp, Unknown
  misc_feature (1)..( 8): Result.005 file - promoters50/2994131
acataaga

SEQ ID NO: 181969 - DNA, 8 bp, Unknown
  misc_feature (1)..( 8): Result.005 file - promoters50/2994131
acacaagt

SEQ ID NO: 181970 - DNA, 7 bp, Unknown
  misc_feature (1)..( 7): Result.005 file - promoters50/2994131
ggcacat

SEQ ID NO: 181971 - DNA, 7 bp, Unknown
  misc_feature (1)..( 7): Result.005 file - promoters50/2994131
ggcccat

SEQ ID NO: 181972 - DNA, 7 bp, Unknown
  misc_feature (1)..( 7): Result.005 file - promoters50/2994131
ggcccat

SEQ ID NO: 181973 - DNA, 9 bp, Unknown
  misc_feature (1)..( 9): Result.005 file - promoters50/2994131
attttagat

SEQ ID NO: 181974 - DNA, 9 bp, Unknown
  misc_feature (1)..( 9): Result.005 file - promoters50/2994131
attttaaac

SEQ ID NO: 181975 - DNA, 9 bp, Unknown
  misc_feature (1)..( 9): Result.005 file - promoters50/2994131
tttttaaaa

SEQ ID NO: 181976 - DNA, 9 bp, Unknown
  misc_feature (1)..( 9): Result.005 file - promoters50/2994131
taccacaac

SEQ ID NO: 181977 - DNA, 9 bp, Unknown
  misc_feature (1)..( 9): Result.005 file - promoters50/2994131
tacaacaac

SEQ ID NO: 181978 - DNA, 9 bp, Unknown
  misc_feature (1)..( 9): Result.005 file - promoters50/2994131
tactacagt

SEQ ID NO: 181979 - DNA, 9 bp, Unknown
  misc_feature (1)..( 9): Result.005 file - promoters50/2994131
taaaactac

SEQ ID NO: 181980 - DNA, 9 bp, Unknown
  misc_feature (1)..( 9): Result.005 file - promoters50/2994131
aaaaactaa

SEQ ID NO: 181981 - DNA, 9 bp, Unknown
  misc_feature (1)..( 9): Result.005 file - promoters50/2994131
tacaacaac

SEQ ID NO: 181982 - DNA, 12 bp, Unknown
  misc_feature (1)..( 12): Result.005 file - promoters50/2994202
aagacatttggg

SEQ ID NO: 181983 - DNA, 12 bp, Unknown
  misc_feature (1)..( 12): Result.005 file - promoters50/2994202
ttggcatttgga

SEQ ID NO: 181984 - DNA, 12 bp, Unknown
  misc_feature (1)..( 12): Result.005 file - promoters50/2994202
cctacattttat

SEQ ID NO: 181985 - DNA, 12 bp, Unknown
  misc_feature (1)..( 12): Result.005 file - promoters50/2994202
cactgttttgac

SEQ ID NO: 181986 - DNA, 12 bp, Unknown
  misc_feature (1)..( 12): Result.005 file - promoters50/2994202
tgaacattatat

SEQ ID NO: 181987 - DNA, 12 bp, Unknown
  misc_feature (1)..( 12): Result.005 file - promoters50/2994202
tatactttcgcc

SEQ ID NO: 181988 - DNA, 7 bp, Unknown
  misc_feature (1)..( 7): Result.005 file - promoters50/2994225
cttttat

SEQ ID NO: 181989 - DNA, 7 bp, Unknown
  misc_feature (1)..( 7): Result.005 file - promoters50/2994225
tttttat

SEQ ID NO: 181990 - DNA, 7 bp, Unknown
  misc_feature (1)..( 7): Result.005 file - promoters50/2994225
tttttaa

SEQ ID NO: 181991 - DNA, 8 bp, Unknown
  misc_feature (1)..( 8): Result.005 file - promoters50/2994869
aaagatta

SEQ ID NO: 181992 - DNA, 8 bp, Unknown
  misc_feature (1)..( 8): Result.005 file - promoters50/2994869
aaagattc

SEQ ID NO: 181993 - DNA, 8 bp, Unknown
  misc_feature (1)..( 8): Result.005 file - promoters50/2994869
ccagattc

SEQ ID NO: 181994 - DNA, 10 bp, Unknown
  misc_feature (1)..( 10): Result.005 file - promoters50/2994916
agaaacaaaa

SEQ ID NO: 181995 - DNA, 10 bp, Unknown
  misc_feature (1)..( 10): Result.005 file - promoters50/2994916
ttgaacaaac

SEQ ID NO: 181996 - DNA, 10 bp, Unknown
  misc_feature (1)..( 10): Result.005 file - promoters50/2994916
acaaataaaa

SEQ ID NO: 181997 - DNA, 10 bp, Unknown
  misc_feature (1)..( 10): Result.005 file - promoters50/2994916
ctaaacaaca

SEQ ID NO: 181998 - DNA, 10 bp, Unknown
  misc_feature (1)..( 10): Result.005 file - promoters50/2994916
taaaacaaag

SEQ ID NO: 181999 - DNA, 11 bp, Unknown
  misc_feature (1)..( 11): Result.005 file - promoters50/2994916
ttaaatcaaat

SEQ ID NO: 182000 - DNA, 14 bp, Unknown
  misc_feature (1)..( 14): Result.005 file - promoters50/2994916
ggttcctaaatcaa

SEQ ID NO: 182001 - DNA, 14 bp, Unknown
  misc_feature (1)..( 14): Result.005 file - promoters50/2994916
atacactaaaacaa

SEQ ID NO: 182002 - DNA, 14 bp, Unknown
  misc_feature (1)..( 14): Result.005 file - promoters50/2994916
aaaaactaaatgat

SEQ ID NO: 182003 - DNA, 13 bp, Unknown
  misc_feature (1)..( 13): Result.005 file - promoters50/2994916
tcttctaaaacat

SEQ ID NO: 182004 - DNA, 14 bp, Unknown
  misc_feature (1)..( 14): Result.005 file - promoters50/2994916
aaattataacacac

SEQ ID NO: 182005 - DNA, 14 bp, Unknown
  misc_feature (1)..( 14): Result.005 file - promoters50/2994916
aaaaagtaaataca

SEQ ID NO: 182006 - DNA, 15 bp, Unknown
  misc_feature (1)..( 15): Result.005 file - promoters50/2994916
caacaatcttaaaat

SEQ ID NO: 182007 - DNA, 15 bp, Unknown
  misc_feature (1)..( 15): Result.005 file - promoters50/2994916
atacaattttaagcg

SEQ ID NO: 182008 - DNA, 15 bp, Unknown
  misc_feature (1)..( 15): Result.005 file - promoters50/2994916
ggggtatctgaaaaa

SEQ ID NO: 182009 - DNA, 15 bp, Unknown
  misc_feature (1)..( 15): Result.005 file - promoters50/2994916
gactaattttagggt

SEQ ID NO: 182010 - DNA, 15 bp, Unknown
  misc_feature (1)..( 15): Result.005 file - promoters50/2994916
ttactattcctaccc

SEQ ID NO: 182011 - DNA, 15 bp, Unknown
  misc_feature (1)..( 15): Result.005 file - promoters50/2994916
atacaataagttgta

SEQ ID NO: 182012 - DNA, 15 bp, Unknown
  misc_feature (1)..( 15): Result.005 file - promoters50/2994916
acacaccaagaaaaa

SEQ ID NO: 182013 - DNA, 12 bp, Unknown
  misc_feature (1)..( 12): Result.005 file - promoters50/2994916
atttaaaaacta

SEQ ID NO: 182014 - DNA, 12 bp, Unknown
  misc_feature (1)..( 12): Result.005 file - promoters50/2994916
caataaaaaaaa

SEQ ID NO: 182015 - DNA, 12 bp, Unknown
  misc_feature (1)..( 12): Result.005 file - promoters50/2994916
atttcaaatata

SEQ ID NO: 182016 - DNA, 12 bp, Unknown
  misc_feature (1)..( 12): Result.005 file - promoters50/2994916
cgtcaaaaaagt

SEQ ID NO: 182017 - DNA, 12 bp, Unknown
  misc_feature (1)..( 12): Result.005 file - promoters50/2994916
aatttaatttct

SEQ ID NO: 182018 - DNA, 12 bp, Unknown
  misc_feature (1)..( 12): Result.005 file - promoters50/2994916
caaaaaaattca

SEQ ID NO: 182019 - DNA, 8 bp, Unknown
  misc_feature (1)..( 8): Result.005 file - promoters50/2994916
aaaacaaa

SEQ ID NO: 182020 - DNA, 8 bp, Unknown
  misc_feature (1)..( 8): Result.005 file - promoters50/2994916
aaaacaaa

SEQ ID NO: 182021 - DNA, 8 bp, Unknown
  misc_feature (1)..( 8): Result.005 file - promoters50/2994916
aaatcaaa

SEQ ID NO: 182022 - DNA, 8 bp, Unknown
  misc_feature (1)..( 8): Result.005 file - promoters50/2994916
caaataaa

SEQ ID NO: 182023 - DNA, 8 bp, Unknown
  misc_feature (1)..( 8): Result.005 file - promoters50/2994916
taaacaac

SEQ ID NO: 182024 - DNA, 8 bp, Unknown
  misc_feature (1)..( 8): Result.005 file - promoters50/2994916
tgaacaaa

SEQ ID NO: 182025 - DNA, 11 bp, Unknown
  misc_feature (1)..( 11): Result.005 file - promoters50/2994916
tcacaattttt

SEQ ID NO: 182026 - DNA, 11 bp, Unknown
  misc_feature (1)..( 11): Result.005 file - promoters50/2994916
gttcaatttaa

SEQ ID NO: 182027 - DNA, 11 bp, Unknown
  misc_feature (1)..( 11): Result.005 file - promoters50/2994916
atataatttta

SEQ ID NO: 182028 - DNA, 11 bp, Unknown
  misc_feature (1)..( 11): Result.005 file - promoters50/2994916
aagatattttt

SEQ ID NO: 182029 - DNA, 11 bp, Unknown
  misc_feature (1)..( 11): Result.005 file - promoters50/2994916
gttaaatttca

SEQ ID NO: 182030 - DNA, 11 bp, Unknown
  misc_feature (1)..( 11): Result.005 file - promoters50/2994916
aaaaaattcac

SEQ ID NO: 182031 - DNA, 9 bp, Unknown
  misc_feature (1)..( 9): Result.005 file - promoters50/2994916
agaaggttg

SEQ ID NO: 182032 - DNA, 9 bp, Unknown
  misc_feature (1)..( 9): Result.005 file - promoters50/2994916
agaatgttt

SEQ ID NO: 182033 - DNA, 9 bp, Unknown
  misc_feature (1)..( 9): Result.005 file - promoters50/2994916
ttaatgttg

SEQ ID NO: 182034 - DNA, 9 bp, Unknown
  misc_feature (1)..( 9): Result.005 file - promoters50/2994916
ataattttt

SEQ ID NO: 182035 - DNA, 9 bp, Unknown
  misc_feature (1)..( 9): Result.005 file - promoters50/2994916
atcattttt

SEQ ID NO: 182036 - DNA, 9 bp, Unknown
  misc_feature (1)..( 9): Result.005 file - promoters50/2994916
atcatttta

SEQ ID NO: 182037 - DNA, 10 bp, Unknown
  misc_feature (1)..( 10): Result.005 file - promoters50/2994916
taaatgattt

SEQ ID NO: 182038 - DNA, 12 bp, Unknown
  misc_feature (1)..( 12): Result.005 file - promoters50/2994916
gaatctcttttc

SEQ ID NO: 182039 - DNA, 12 bp, Unknown
  misc_feature (1)..( 12): Result.005 file - promoters50/2994916
gaatgtctcaat

SEQ ID NO: 182040 - DNA, 12 bp, Unknown
  misc_feature (1)..( 12): Result.005 file - promoters50/2994916
taatttcttcac

SEQ ID NO: 182041 - DNA, 12 bp, Unknown
  misc_feature (1)..( 12): Result.005 file - promoters50/2994916
gtctgtctcaat

SEQ ID NO: 182042 - DNA, 12 bp, Unknown
  misc_feature (1)..( 12): Result.005 file - promoters50/2994916
aaatttcaaata

SEQ ID NO: 182043 - DNA, 12 bp, Unknown
  misc_feature (1)..( 12): Result.005 file - promoters50/2994916
aaaattcacggt

SEQ ID NO: 182044 - DNA, 13 bp, Unknown
  misc_feature (1)..( 13): Result.005 file - promoters50/2994916
cttcatataaata

SEQ ID NO: 182045 - DNA, 13 bp, Unknown
  misc_feature (1)..( 13): Result.005 file - promoters50/2994916
gtttatataagtg

SEQ ID NO: 182046 - DNA, 13 bp, Unknown
  misc_feature (1)..( 13): Result.005 file - promoters50/2994916
ttagctataaaag

SEQ ID NO: 182047 - DNA, 13 bp, Unknown
  misc_feature (1)..( 13): Result.005 file - promoters50/2994916
cttcctatattta

SEQ ID NO: 182048 - DNA, 13 bp, Unknown
  misc_feature (1)..( 13): Result.005 file - promoters50/2994916
gtatatataaata

SEQ ID NO: 182049 - DNA, 13 bp, Unknown
  misc_feature (1)..( 13): Result.005 file - promoters50/2994916
ttatttatatgtt

SEQ ID NO: 182050 - DNA, 9 bp, Unknown
  misc_feature (1)..( 9): Result.005 file - promoters50/2995201
aatttatag

SEQ ID NO: 182051 - DNA, 9 bp, Unknown
  misc_feature (1)..( 9): Result.005 file - promoters50/2995201
aatgtataa

SEQ ID NO: 182052 - DNA, 9 bp, Unknown
  misc_feature (1)..( 9): Result.005 file - promoters50/2995201
attttatac

SEQ ID NO: 182053 - DNA, 9 bp, Unknown
  misc_feature (1)..( 9): Result.005 file - promoters50/2995201
tctttataa

SEQ ID NO: 182054 - DNA, 9 bp, Unknown
  misc_feature (1)..( 9): Result.005 file - promoters50/2995201
attgtctaa

SEQ ID NO: 182055 - DNA, 8 bp, Unknown
  misc_feature (1)..( 8): Result.005 file - promoters50/2995201
aaaaatta

SEQ ID NO: 182056 - DNA, 8 bp, Unknown
  misc_feature (1)..( 8): Result.005 file - promoters50/2995201
aaatatta

SEQ ID NO: 182057 - DNA, 8 bp, Unknown
  misc_feature (1)..( 8): Result.005 file - promoters50/2995201
aaaaatca

SEQ ID NO: 182058 - DNA, 9 bp, Unknown
  misc_feature (1)..( 9): Result.005 file - promoters50/2995201
aaagtattt

SEQ ID NO: 182059 - DNA, 11 bp, Unknown
  misc_feature (1)..( 11): Result.005 file - promoters50/2995201
ttaattatgga

SEQ ID NO: 182060 - DNA, 11 bp, Unknown
  misc_feature (1)..( 11): Result.005 file - promoters50/2995201
tatattttggt

SEQ ID NO: 182061 - DNA, 11 bp, Unknown
  misc_feature (1)..( 11): Result.005 file - promoters50/2995201
tataatttgtg

SEQ ID NO: 182062 - DNA, 11 bp, Unknown
  misc_feature (1)..( 11): Result.005 file - promoters50/2995201
ccagctttggt

SEQ ID NO: 182063 - DNA, 8 bp, Unknown
  misc_feature (1)..( 8): Result.005 file - promoters50/2995201
aacataat

SEQ ID NO: 182064 - DNA, 8 bp, Unknown
  misc_feature (1)..( 8): Result.005 file - promoters50/2995201
aacctaaa

SEQ ID NO: 182065 - DNA, 8 bp, Unknown
  misc_feature (1)..( 8): Result.005 file - promoters50/2995201
gacataag

SEQ ID NO: 182066 - DNA, 8 bp, Unknown
  misc_feature (1)..( 8): Result.005 file - promoters50/2995201
agcataag

SEQ ID NO: 182067 - DNA, 7 bp, Unknown
  misc_feature (1)..( 7): Result.005 file - promoters50/2995898
agagaaa

SEQ ID NO: 182068 - DNA, 7 bp, Unknown
  misc_feature (1)..( 7): Result.005 file - promoters50/2995898
agagaaa

SEQ ID NO: 182069 - DNA, 7 bp, Unknown
  misc_feature (1)..( 7): Result.005 file - promoters50/2995898
agagaag

SEQ ID NO: 182070 - DNA, 10 bp, Unknown
  misc_feature (1)..( 10): Result.005 file - promoters50/2995898
tgacgatgaa

SEQ ID NO: 182071 - DNA, 10 bp, Unknown
  misc_feature (1)..( 10): Result.005 file - promoters50/2995898
aaacgaagaa

SEQ ID NO: 182072 - DNA, 10 bp, Unknown
  misc_feature (1)..( 10): Result.005 file - promoters50/2995898
tgaggatgtt

SEQ ID NO: 182073 - DNA, 8 bp, Unknown
  misc_feature (1)..( 8): Result.005 file - promoters50/2995898
gataattt

SEQ ID NO: 182074 - DNA, 8 bp, Unknown
  misc_feature (1)..( 8): Result.005 file - promoters50/2995898
gatagttt

SEQ ID NO: 182075 - DNA, 8 bp, Unknown
  misc_feature (1)..( 8): Result.005 file - promoters50/2995898
attaattt

SEQ ID NO: 182076 - DNA, 7 bp, Unknown
  misc_feature (1)..( 7): Result.005 file - promoters50/2995898
atataat

SEQ ID NO: 182077 - DNA, 7 bp, Unknown
  misc_feature (1)..( 7): Result.005 file - promoters50/2995898
atataat

SEQ ID NO: 182078 - DNA, 8 bp, Unknown
  misc_feature (1)..( 8): Result.005 file - promoters50/2995898
atagtatt

SEQ ID NO: 182079 - DNA, 12 bp, Unknown
  misc_feature (1)..( 12): Result.005 file - promoters50/2995898
tttaagttttta

SEQ ID NO: 182080 - DNA, 12 bp, Unknown
  misc_feature (1)..( 12): Result.005 file - promoters50/2995898
tttaactttttt

SEQ ID NO: 182081 - DNA, 12 bp, Unknown
  misc_feature (1)..( 12): Result.005 file - promoters50/2995898
tcgtcgttttta

SEQ ID NO: 182082 - DNA, 11 bp, Unknown
  misc_feature (1)..( 11): Result.005 file - promoters50/2996021
tcctatcatct

SEQ ID NO: 182083 - DNA, 11 bp, Unknown
  misc_feature (1)..( 11): Result.005 file - promoters50/2996021
tccgatcacaa

SEQ ID NO: 182084 - DNA, 11 bp, Unknown
  misc_feature (1)..( 11): Result.005 file - promoters50/2996021
gtagattacaa

SEQ ID NO: 182085 - DNA, 6 bp, Unknown
  misc_feature (1)..( 6): Result.005 file - promoters50/2996054
caaaaa

SEQ ID NO: 182086 - DNA, 6 bp, Unknown
  misc_feature (1)..( 6): Result.005 file - promoters50/2996054
caaaaa

SEQ ID NO: 182087 - DNA, 6 bp, Unknown
  misc_feature (1)..( 6): Result.005 file - promoters50/2996054
caaaaa

SEQ ID NO: 182088 - DNA, 10 bp, Unknown
  misc_feature (1)..( 10): Result.005 file - promoters50/2996054
taattttact

SEQ ID NO: 182089 - DNA, 10 bp, Unknown
  misc_feature (1)..( 10): Result.005 file - promoters50/2996054
tgttttcact

SEQ ID NO: 182090 - DNA, 10 bp, Unknown
  misc_feature (1)..( 10): Result.005 file - promoters50/2996054
tgtattcacc

SEQ ID NO: 182091 - DNA, 9 bp, Unknown
  misc_feature (1)..( 9): Result.005 file - promoters50/2996054
aactttttt

SEQ ID NO: 182092 - DNA, 9 bp, Unknown
  misc_feature (1)..( 9): Result.005 file - promoters50/2996054
aactcttta

SEQ ID NO: 182093 - DNA, 10 bp, Unknown
  misc_feature (1)..( 10): Result.005 file - promoters50/2996054
tgttttatta

SEQ ID NO: 182094 - DNA, 9 bp, Unknown
  misc_feature (1)..( 9): Result.005 file - promoters50/2996054
ttgtctaag

SEQ ID NO: 182095 - DNA, 9 bp, Unknown
  misc_feature (1)..( 9): Result.005 file - promoters50/2996054
ctgtcaaag

SEQ ID NO: 182096 - DNA, 9 bp, Unknown
  misc_feature (1)..( 9): Result.005 file - promoters50/2996054
ctgtcatta

SEQ ID NO: 182097 - DNA, 13 bp, Unknown
  misc_feature (1)..( 13): Result.005 file - promoters50/2996080
gattaatgatcaa

SEQ ID NO: 182098 - DNA, 13 bp, Unknown
  misc_feature (1)..( 13): Result.005 file - promoters50/2996080
atataaagataag

SEQ ID NO: 182099 - DNA, 13 bp, Unknown
  misc_feature (1)..( 13): Result.005 file - promoters50/2996080
cgattatgatcaa

SEQ ID NO: 182100 - DNA, 13 bp, Unknown
  misc_feature (1)..( 13): Result.005 file - promoters50/2996080
gattaaagattaa

SEQ ID NO: 182101 - DNA, 13 bp, Unknown
  misc_feature (1)..( 13): Result.005 file - promoters50/2996080
aaaaaaaaataac

SEQ ID NO: 182102 - DNA, 13 bp, Unknown
  misc_feature (1)..( 13): Result.005 file - promoters50/2996080
agatacagaacaa

SEQ ID NO: 182103 - DNA, 13 bp, Unknown
  misc_feature (1)..( 13): Result.005 file - promoters50/2996080
ctacaattacttt

SEQ ID NO: 182104 - DNA, 10 bp, Unknown
  misc_feature (1)..( 10): Result.005 file - promoters50/2996092
gagattaata

SEQ ID NO: 182105 - DNA, 10 bp, Unknown
  misc_feature (1)..( 10): Result.005 file - promoters50/2996092
tcgattaaca

SEQ ID NO: 182106 - DNA, 10 bp, Unknown
  misc_feature (1)..( 10): Result.005 file - promoters50/2996092
aagatcaatc

SEQ ID NO: 182107 - DNA, 10 bp, Unknown
  misc_feature (1)..( 10): Result.005 file - promoters50/2996092
aagagtaaac

SEQ ID NO: 182108 - DNA, 10 bp, Unknown
  misc_feature (1)..( 10): Result.005 file - promoters50/2996092
actattgaca

SEQ ID NO: 182109 - DNA, 10 bp, Unknown
  misc_feature (1)..( 10): Result.005 file - promoters50/2996092
aagagtcttg

SEQ ID NO: 182110 - DNA, 8 bp, Unknown
  misc_feature (1)..( 8): Result.005 file - promoters50/2996109
attttttt

SEQ ID NO: 182111 - DNA, 8 bp, Unknown
  misc_feature (1)..( 8): Result.005 file - promoters50/2996109
attatttg

SEQ ID NO: 182112 - DNA, 8 bp, Unknown
  misc_feature (1)..( 8): Result.005 file - promoters50/2996109
attgtttt

SEQ ID NO: 182113 - DNA, 13 bp, Unknown
  misc_feature (1)..( 13): Result.005 file - promoters50/2996109
taattaaacataa

SEQ ID NO: 182114 - DNA, 13 bp, Unknown
  misc_feature (1)..( 13): Result.005 file - promoters50/2996109
taattatgttttg

SEQ ID NO: 182115 - DNA, 13 bp, Unknown
  misc_feature (1)..( 13): Result.005 file - promoters50/2996109
taataaaatataa

SEQ ID NO: 182116 - DNA, 13 bp, Unknown
  misc_feature (1)..( 13): Result.005 file - promoters50/2996109
caattaaaaaagg

SEQ ID NO: 182117 - DNA, 13 bp, Unknown
  misc_feature (1)..( 13): Result.005 file - promoters50/2996109
taattaaacataa

SEQ ID NO: 182118 - DNA, 13 bp, Unknown
  misc_feature (1)..( 13): Result.005 file - promoters50/2996109
gcttccaacttaa

SEQ ID NO: 182119 - DNA, 13 bp, Unknown
  misc_feature (1)..( 13): Result.005 file - promoters50/2996109
taataaaatataa

SEQ ID NO: 182120 - DNA, 7 bp, Unknown
  misc_feature (1)..( 7): Result.005 file - promoters50/2996109
aaacatc

SEQ ID NO: 182121 - DNA, 7 bp, Unknown
  misc_feature (1)..( 7): Result.005 file - promoters50/2996109
taacatc

SEQ ID NO: 182122 - DNA, 7 bp, Unknown
  misc_feature (1)..( 7): Result.005 file - promoters50/2996109
aaacatt

SEQ ID NO: 182123 - DNA, 8 bp, Unknown
  misc_feature (1)..( 8): Result.005 file - promoters50/2996109
aatatacc

SEQ ID NO: 182124 - DNA, 8 bp, Unknown
  misc_feature (1)..( 8): Result.005 file - promoters50/2996109
aatatata

SEQ ID NO: 182125 - DNA, 8 bp, Unknown
  misc_feature (1)..( 8): Result.005 file - promoters50/2996109
catagata

SEQ ID NO: 182126 - DNA, 7 bp, Unknown
  misc_feature (1)..( 7): Result.005 file - promoters50/2996109
tataata

SEQ ID NO: 182127 - DNA, 7 bp, Unknown
  misc_feature (1)..( 7): Result.005 file - promoters50/2996109
tattata

SEQ ID NO: 182128 - DNA, 7 bp, Unknown
  misc_feature (1)..( 7): Result.005 file - promoters50/2996109
tattatg

SEQ ID NO: 182129 - DNA, 13 bp, Unknown
  misc_feature (1)..( 13): Result.005 file - promoters50/2996109
aacaatcaaatgt

SEQ ID NO: 182130 - DNA, 13 bp, Unknown
  misc_feature (1)..( 13): Result.005 file - promoters50/2996109
aacagtcaaaaaa

SEQ ID NO: 182131 - DNA, 13 bp, Unknown
  misc_feature (1)..( 13): Result.005 file - promoters50/2996109
tcaggtcaaatcc

SEQ ID NO: 182132 - DNA, 13 bp, Unknown
  misc_feature (1)..( 13): Result.005 file - promoters50/2996109
aaatctcaaaaaa

SEQ ID NO: 182133 - DNA, 7 bp, Unknown
  misc_feature (1)..( 7): Result.005 file - promoters50/2996109
caaaaag

SEQ ID NO: 182134 - DNA, 7 bp, Unknown
  misc_feature (1)..( 7): Result.005 file - promoters50/2996109
aaaaaag

SEQ ID NO: 182135 - DNA, 7 bp, Unknown
  misc_feature (1)..( 7): Result.005 file - promoters50/2996109
aaaaaag

SEQ ID NO: 182136 - DNA, 8 bp, Unknown
  misc_feature (1)..( 8): Result.005 file - promoters50/2996109
ttttctat

SEQ ID NO: 182137 - DNA, 8 bp, Unknown
  misc_feature (1)..( 8): Result.005 file - promoters50/2996109
ttttgtat

SEQ ID NO: 182138 - DNA, 8 bp, Unknown
  misc_feature (1)..( 8): Result.005 file - promoters50/2996109
atttgtaa

SEQ ID NO: 182139 - DNA, 8 bp, Unknown
  misc_feature (1)..( 8): Result.005 file - promoters50/2996115
tttttact

SEQ ID NO: 182140 - DNA, 8 bp, Unknown
  misc_feature (1)..( 8): Result.005 file - promoters50/2996115
tttataca

SEQ ID NO: 182141 - DNA, 8 bp, Unknown
  misc_feature (1)..( 8): Result.005 file - promoters50/2996115
ttttaact

SEQ ID NO: 182142 - DNA, 12 bp, Unknown
  misc_feature (1)..( 12): Result.005 file - promoters50/2996115
tttacaatatat

SEQ ID NO: 182143 - DNA, 12 bp, Unknown
  misc_feature (1)..( 12): Result.005 file - promoters50/2996115
tttaaaatatat

SEQ ID NO: 182144 - DNA, 12 bp, Unknown
  misc_feature (1)..( 12): Result.005 file - promoters50/2996115
tttaaacatgtc

SEQ ID NO: 182145 - DNA, 9 bp, Unknown
  misc_feature (1)..( 9): Result.005 file - promoters50/2996115
aattgccat

SEQ ID NO: 182146 - DNA, 9 bp, Unknown
  misc_feature (1)..( 9): Result.005 file - promoters50/2996115
aattcccac

SEQ ID NO: 182147 - DNA, 9 bp, Unknown
  misc_feature (1)..( 9): Result.005 file - promoters50/2996115
gattctcac

SEQ ID NO: 182148 - DNA, 10 bp, Unknown
  misc_feature (1)..( 10): Result.005 file - promoters50/2996115
caaagttgtt

SEQ ID NO: 182149 - DNA, 10 bp, Unknown
  misc_feature (1)..( 10): Result.005 file - promoters50/2996115
caaatttggc

SEQ ID NO: 182150 - DNA, 10 bp, Unknown
  misc_feature (1)..( 10): Result.005 file - promoters50/2996115
caaagttgtt

SEQ ID NO: 182151 - DNA, 10 bp, Unknown
  misc_feature (1)..( 10): Result.005 file - promoters50/2996115
gtaatttgaa

SEQ ID NO: 182152 - DNA, 9 bp, Unknown
  misc_feature (1)..( 9): Result.005 file - promoters50/2996119
aaacaacga

SEQ ID NO: 182153 - DNA, 9 bp, Unknown
  misc_feature (1)..( 9): Result.005 file - promoters50/2996119
aaaaaacga

SEQ ID NO: 182154 - DNA, 9 bp, Unknown
  misc_feature (1)..( 9): Result.005 file - promoters50/2996119
aaataacat

SEQ ID NO: 182155 - DNA, 18 bp, Unknown
  misc_feature (1)..( 18): Result.005 file - promoters50/2996222
aaaaattattaaagtata

SEQ ID NO: 182156 - DNA, 18 bp, Unknown
  misc_feature (1)..( 18): Result.005 file - promoters50/2996222
aaagattattaaattata

SEQ ID NO: 182157 - DNA, 18 bp, Unknown
  misc_feature (1)..( 18): Result.005 file - promoters50/2996222
aaaatttatctgtaaatg

SEQ ID NO: 182158 - DNA, 18 bp, Unknown
  misc_feature (1)..( 18): Result.005 file - promoters50/2996222
aaaatatgaatataatga

SEQ ID NO: 182159 - DNA, 18 bp, Unknown
  misc_feature (1)..( 18): Result.005 file - promoters50/2996222
tatgtatattgcggatta

SEQ ID NO: 182160 - DNA, 18 bp, Unknown
  misc_feature (1)..( 18): Result.005 file - promoters50/2996222
gctatttatctgcaactt

SEQ ID NO: 182161 - DNA, 18 bp, Unknown
  misc_feature (1)..( 18): Result.005 file - promoters50/2996222
aaaacatgagtactcgat

SEQ ID NO: 182162 - DNA, 18 bp, Unknown
  misc_feature (1)..( 18): Result.005 file - promoters50/2996222
ttaatatgagaaactaaa

SEQ ID NO: 182163 - DNA, 10 bp, Unknown
  misc_feature (1)..( 10): Result.005 file - promoters50/2996222
tttactaata

SEQ ID NO: 182164 - DNA, 10 bp, Unknown
  misc_feature (1)..( 10): Result.005 file - promoters50/2996222
attattaaag

SEQ ID NO: 182165 - DNA, 10 bp, Unknown
  misc_feature (1)..( 10): Result.005 file - promoters50/2996222
tttgctatac

SEQ ID NO: 182166 - DNA, 10 bp, Unknown
  misc_feature (1)..( 10): Result.005 file - promoters50/2996222
tataataatt

SEQ ID NO: 182167 - DNA, 10 bp, Unknown
  misc_feature (1)..( 10): Result.005 file - promoters50/2996222
actaaaaata

SEQ ID NO: 182168 - DNA, 10 bp, Unknown
  misc_feature (1)..( 10): Result.005 file - promoters50/2996222
cgaaccaaaa

SEQ ID NO: 182169 - DNA, 11 bp, Unknown
  misc_feature (1)..( 11): Result.005 file - promoters50/2996222
ataattttaga

SEQ ID NO: 182170 - DNA, 11 bp, Unknown
  misc_feature (1)..( 11): Result.005 file - promoters50/2996222
ctaattttaat

SEQ ID NO: 182171 - DNA, 11 bp, Unknown
  misc_feature (1)..( 11): Result.005 file - promoters50/2996222
ataattatttg

SEQ ID NO: 182172 - DNA, 11 bp, Unknown
  misc_feature (1)..( 11): Result.005 file - promoters50/2996222
atactttatcg

SEQ ID NO: 182173 - DNA, 11 bp, Unknown
  misc_feature (1)..( 11): Result.005 file - promoters50/2996222
atatttatttg

SEQ ID NO: 182174 - DNA, 11 bp, Unknown
  misc_feature (1)..( 11): Result.005 file - promoters50/2996222
atatttgccaa

SEQ ID NO: 182175 - DNA, 13 bp, Unknown
  misc_feature (1)..( 13): Result.005 file - promoters50/2996222
atcattttacttt

SEQ ID NO: 182176 - DNA, 13 bp, Unknown
  misc_feature (1)..( 13): Result.005 file - promoters50/2996222
aatattttagtcg

SEQ ID NO: 182177 - DNA, 13 bp, Unknown
  misc_feature (1)..( 13): Result.005 file - promoters50/2996222
ttatttttactca

SEQ ID NO: 182178 - DNA, 13 bp, Unknown
  misc_feature (1)..( 13): Result.005 file - promoters50/2996222
acgtttttaccct

SEQ ID NO: 182179 - DNA, 13 bp, Unknown
  misc_feature (1)..( 13): Result.005 file - promoters50/2996222
aatactttatcgt

SEQ ID NO: 182180 - DNA, 13 bp, Unknown
  misc_feature (1)..( 13): Result.005 file - promoters50/2996222
ctaattttagcaa

SEQ ID NO: 182181 - DNA, 13 bp, Unknown
  misc_feature (1)..( 13): Result.005 file - promoters50/2996222
ccatctttaacaa

SEQ ID NO: 182182 - DNA, 12 bp, Unknown
  misc_feature (1)..( 12): Result.005 file - promoters50/2996222
actatatatatc

SEQ ID NO: 182183 - DNA, 12 bp, Unknown
  misc_feature (1)..( 12): Result.005 file - promoters50/2996222
tttatttatatg

SEQ ID NO: 182184 - DNA, 12 bp, Unknown
  misc_feature (1)..( 12): Result.005 file - promoters50/2996222
actctatataaa

SEQ ID NO: 182185 - DNA, 12 bp, Unknown
  misc_feature (1)..( 12): Result.005 file - promoters50/2996222
cgtatatataaa

SEQ ID NO: 182186 - DNA, 12 bp, Unknown
  misc_feature (1)..( 12): Result.005 file - promoters50/2996222
actataaataga

SEQ ID NO: 182187 - DNA, 12 bp, Unknown
  misc_feature (1)..( 12): Result.005 file - promoters50/2996222
tgtctatatgac

SEQ ID NO: 182188 - DNA, 12 bp, Unknown
  misc_feature (1)..( 12): Result.005 file - promoters50/2996222
aatctataaaaa

SEQ ID NO: 182189 - DNA, 12 bp, Unknown
  misc_feature (1)..( 12): Result.005 file - promoters50/2996222
ttcgtatatgaa

SEQ ID NO: 182190 - DNA, 9 bp, Unknown
  misc_feature (1)..( 9): Result.005 file - promoters50/2996222
taatagaag

SEQ ID NO: 182191 - DNA, 9 bp, Unknown
  misc_feature (1)..( 9): Result.005 file - promoters50/2996222
taattgaac

SEQ ID NO: 182192 - DNA, 9 bp, Unknown
  misc_feature (1)..( 9): Result.005 file - promoters50/2996222
aaattatta

SEQ ID NO: 182193 - DNA, 9 bp, Unknown
  misc_feature (1)..( 9): Result.005 file - promoters50/2996222
taaaaatat

SEQ ID NO: 182194 - DNA, 9 bp, Unknown
  misc_feature (1)..( 9): Result.005 file - promoters50/2996222
tgaatataa

SEQ ID NO: 182195 - DNA, 9 bp, Unknown
  misc_feature (1)..( 9): Result.005 file - promoters50/2996222
tatgtatat

SEQ ID NO: 182196 - DNA, 9 bp, Unknown
  misc_feature (1)..( 9): Result.005 file - promoters50/2996222
tatttatct

SEQ ID NO: 182197 - DNA, 10 bp, Unknown
  misc_feature (1)..( 10): Result.005 file - promoters50/2996222
aattttgtta

SEQ ID NO: 182198 - DNA, 10 bp, Unknown
  misc_feature (1)..( 10): Result.005 file - promoters50/2996222
ctttttgttt

SEQ ID NO: 182199 - DNA, 10 bp, Unknown
  misc_feature (1)..( 10): Result.005 file - promoters50/2996222
agatttgtta

SEQ ID NO: 182200 - DNA, 10 bp, Unknown
  misc_feature (1)..( 10): Result.005 file - promoters50/2996222
atatttgtaa

SEQ ID NO: 182201 - DNA, 10 bp, Unknown
  misc_feature (1)..( 10): Result.005 file - promoters50/2996222
ttatttgtaa

SEQ ID NO: 182202 - DNA, 10 bp, Unknown
  misc_feature (1)..( 10): Result.005 file - promoters50/2996222
gtatatgtta

SEQ ID NO: 182203 - DNA, 10 bp, Unknown
  misc_feature (1)..( 10): Result.005 file - promoters50/2996222
ttatttgaag

SEQ ID NO: 182204 - DNA, 8 bp, Unknown
  misc_feature (1)..( 8): Result.005 file - promoters50/2996281
atcaaaaa

SEQ ID NO: 182205 - DNA, 8 bp, Unknown
  misc_feature (1)..( 8): Result.005 file - promoters50/2996281
atccaaat

SEQ ID NO: 182206 - DNA, 8 bp, Unknown
  misc_feature (1)..( 8): Result.005 file - promoters50/2996281
atcgaaaa

SEQ ID NO: 182207 - DNA, 8 bp, Unknown
  misc_feature (1)..( 8): Result.005 file - promoters50/2996281
taagtttt

SEQ ID NO: 182208 - DNA, 8 bp, Unknown
  misc_feature (1)..( 8): Result.005 file - promoters50/2996281
ttagtttt

SEQ ID NO: 182209 - DNA, 8 bp, Unknown
  misc_feature (1)..( 8): Result.005 file - promoters50/2996281
taagtttt

SEQ ID NO: 182210 - DNA, 19 bp, Unknown
  misc_feature (1)..( 19): Result.005 file - promoters50/2996290
cacaaggacaagtttctcc

SEQ ID NO: 182211 - DNA, 19 bp, Unknown
  misc_feature (1)..( 19): Result.005 file - promoters50/2996290
cactaggccaactttcata

SEQ ID NO: 182212 - DNA, 19 bp, Unknown
  misc_feature (1)..( 19): Result.005 file - promoters50/2996290
cagaaatgtaactttcaca

SEQ ID NO: 182213 - DNA, 19 bp, Unknown
  misc_feature (1)..( 19): Result.005 file - promoters50/2996290
ccatcatcaatctttcaaa

SEQ ID NO: 182214 - DNA, 19 bp, Unknown
  misc_feature (1)..( 19): Result.005 file - promoters50/2996290
gctcgctgtttctttcttc

SEQ ID NO: 182215 - DNA, 19 bp, Unknown
  misc_feature (1)..( 19): Result.005 file - promoters50/2996290
aattataaagtatttaaaa

SEQ ID NO: 182216 - DNA, 14 bp, Unknown
  misc_feature (1)..( 14): Result.005 file - promoters50/2997951
acttttcttgaatc

SEQ ID NO: 182217 - DNA, 14 bp, Unknown
  misc_feature (1)..( 14): Result.005 file - promoters50/2997951
acttatcttcatga

SEQ ID NO: 182218 - DNA, 14 bp, Unknown
  misc_feature (1)..( 14): Result.005 file - promoters50/2997951
cgctttcttcaatc

SEQ ID NO: 182219 - DNA, 14 bp, Unknown
  misc_feature (1)..( 14): Result.005 file - promoters50/2997951
caggttcgtgaacc

SEQ ID NO: 182220 - DNA, 14 bp, Unknown
  misc_feature (1)..( 14): Result.005 file - promoters50/2997951
ccgtatctgcaacc

SEQ ID NO: 182221 - DNA, 15 bp, Unknown
  misc_feature (1)..( 15): Result.005 file - promoters50/2997951
tcaattctatcaata

SEQ ID NO: 182222 - DNA, 12 bp, Unknown
  misc_feature (1)..( 12): Result.005 file - promoters50/2997951
aaaaaacattcc

SEQ ID NO: 182223 - DNA, 12 bp, Unknown
  misc_feature (1)..( 12): Result.005 file - promoters50/2997951
ttaaaatatttc

SEQ ID NO: 182224 - DNA, 12 bp, Unknown
  misc_feature (1)..( 12): Result.005 file - promoters50/2997951
tcaagatatttc

SEQ ID NO: 182225 - DNA, 12 bp, Unknown
  misc_feature (1)..( 12): Result.005 file - promoters50/2997951
ttaaaatagtag

SEQ ID NO: 182226 - DNA, 12 bp, Unknown
  misc_feature (1)..( 12): Result.005 file - promoters50/2997951
agttaatattaa

SEQ ID NO: 182227 - DNA, 12 bp, Unknown
  misc_feature (1)..( 12): Result.005 file - promoters50/2997951
ataaagtatact

SEQ ID NO: 182228 - DNA, 8 bp, Unknown
  misc_feature (1)..( 8): Result.005 file - promoters50/2997951
taattacc

SEQ ID NO: 182229 - DNA, 8 bp, Unknown
  misc_feature (1)..( 8): Result.005 file - promoters50/2997951
aaatcacc

SEQ ID NO: 182230 - DNA, 8 bp, Unknown
  misc_feature (1)..( 8): Result.005 file - promoters50/2997951
taattatt

SEQ ID NO: 182231 - DNA, 8 bp, Unknown
  misc_feature (1)..( 8): Result.005 file - promoters50/2997951
gaatcact

SEQ ID NO: 182232 - DNA, 8 bp, Unknown
  misc_feature (1)..( 8): Result.005 file - promoters50/2997951
taattaaa

SEQ ID NO: 182233 - DNA, 8 bp, Unknown
  misc_feature (1)..( 8): Result.005 file - promoters50/2997951
taatcaaa

SEQ ID NO: 182234 - DNA, 11 bp, Unknown
  misc_feature (1)..( 11): Result.005 file - promoters50/2997951
tttagtactat

SEQ ID NO: 182235 - DNA, 11 bp, Unknown
  misc_feature (1)..( 11): Result.005 file - promoters50/2997951
ttgagtgctaa

SEQ ID NO: 182236 - DNA, 11 bp, Unknown
  misc_feature (1)..( 11): Result.005 file - promoters50/2997951
gccaatactat

SEQ ID NO: 182237 - DNA, 11 bp, Unknown
  misc_feature (1)..( 11): Result.005 file - promoters50/2997951
aacaattctaa

SEQ ID NO: 182238 - DNA, 11 bp, Unknown
  misc_feature (1)..( 11): Result.005 file - promoters50/2997951
aacaagtctct

SEQ ID NO: 182239 - DNA, 11 bp, Unknown
  misc_feature (1)..( 11): Result.005 file - promoters50/2997951
tataatagtat

SEQ ID NO: 182240 - DNA, 8 bp, Unknown
  misc_feature (1)..( 8): Result.005 file - promoters50/3003006
taaagttc

SEQ ID NO: 182241 - DNA, 8 bp, Unknown
  misc_feature (1)..( 8): Result.005 file - promoters50/3003006
gaaacttc

SEQ ID NO: 182242 - DNA, 8 bp, Unknown
  misc_feature (1)..( 8): Result.005 file - promoters50/3003006
gaaccttt

SEQ ID NO: 182243 - DNA, 10 bp, Unknown
  misc_feature (1)..( 10): Result.005 file - promoters50/3003006
gaagttatcg

SEQ ID NO: 182244 - DNA, 10 bp, Unknown
  misc_feature (1)..( 10): Result.005 file - promoters50/3003006
gaaattagat

SEQ ID NO: 182245 - DNA, 10 bp, Unknown
  misc_feature (1)..( 10): Result.005 file - promoters50/3003006
ggaattggat

SEQ ID NO: 182246 - DNA, 10 bp, Unknown
  misc_feature (1)..( 10): Result.005 file - promoters50/3003006
tcgattgaaa

SEQ ID NO: 182247 - DNA, 10 bp, Unknown
  misc_feature (1)..( 10): Result.005 file - promoters50/3003006
tagatcgaaa

SEQ ID NO: 182248 - DNA, 10 bp, Unknown
  misc_feature (1)..( 10): Result.005 file - promoters50/3003006
taggtcgata

SEQ ID NO: 182249 - DNA, 9 bp, Unknown
  misc_feature (1)..( 9): Result.005 file - promoters50/3003010
atcaatttt

SEQ ID NO: 182250 - DNA, 9 bp, Unknown
  misc_feature (1)..( 9): Result.005 file - promoters50/3003010
actaatttt

SEQ ID NO: 182251 - DNA, 9 bp, Unknown
  misc_feature (1)..( 9): Result.005 file - promoters50/3003010
atctatttt

SEQ ID NO: 182252 - DNA, 7 bp, Unknown
  misc_feature (1)..( 7): Result.005 file - promoters50/3003010
taaaaat

SEQ ID NO: 182253 - DNA, 7 bp, Unknown
  misc_feature (1)..( 7): Result.005 file - promoters50/3003010
taataat

SEQ ID NO: 182254 - DNA, 7 bp, Unknown
  misc_feature (1)..( 7): Result.005 file - promoters50/3003010
aaataat

SEQ ID NO: 182255 - DNA, 7 bp, Unknown
  misc_feature (1)..( 7): Result.005 file - promoters50/3003010
caaaatt

SEQ ID NO: 182256 - DNA, 7 bp, Unknown
  misc_feature (1)..( 7): Result.005 file - promoters50/3003010
caatatt

SEQ ID NO: 182257 - DNA, 7 bp, Unknown
  misc_feature (1)..( 7): Result.005 file - promoters50/3003010
caatatg

SEQ ID NO: 182258 - DNA, 8 bp, Unknown
  misc_feature (1)..( 8): Result.005 file - promoters50/3003010
gaataaaa

SEQ ID NO: 182259 - DNA, 8 bp, Unknown
  misc_feature (1)..( 8): Result.005 file - promoters50/3003010
acataaaa

SEQ ID NO: 182260 - DNA, 8 bp, Unknown
  misc_feature (1)..( 8): Result.005 file - promoters50/3003010
acacaaag

SEQ ID NO: 182261 - DNA, 6 bp, Unknown
  misc_feature (1)..( 6): Result.005 file - promoters50/3011901
agaaaa

SEQ ID NO: 182262 - DNA, 6 bp, Unknown
  misc_feature (1)..( 6): Result.005 file - promoters50/3011901
agaaaa

SEQ ID NO: 182263 - DNA, 6 bp, Unknown
  misc_feature (1)..( 6): Result.005 file - promoters50/3011901
agaaaa

SEQ ID NO: 182264 - DNA, 8 bp, Unknown
  misc_feature (1)..( 8): Result.005 file - promoters50/3011901
gagtgaac

SEQ ID NO: 182265 - DNA, 8 bp, Unknown
  misc_feature (1)..( 8): Result.005 file - promoters50/3011901
gagtgaaa

SEQ ID NO: 182266 - DNA, 8 bp, Unknown
  misc_feature (1)..( 8): Result.005 file - promoters50/3011901
gagtaaaa

SEQ ID NO: 182267 - DNA, 10 bp, Unknown
  misc_feature (1)..( 10): Result.005 file - promoters50/3011901
taacataaat

SEQ ID NO: 182268 - DNA, 10 bp, Unknown
  misc_feature (1)..( 10): Result.005 file - promoters50/3011901
taacataaaa

SEQ ID NO: 182269 - DNA, 10 bp, Unknown
  misc_feature (1)..( 10): Result.005 file - promoters50/3011901
gtaaataaaa

SEQ ID NO: 182270 - DNA, 8 bp, Unknown
  misc_feature (1)..( 8): Result.005 file - promoters50/3011901
agtgcatg

SEQ ID NO: 182271 - DNA, 8 bp, Unknown
  misc_feature (1)..( 8): Result.005 file - promoters50/3011901
agtgcaac

SEQ ID NO: 182272 - DNA, 8 bp, Unknown
  misc_feature (1)..( 8): Result.005 file - promoters50/3011901
cgtgaaac

SEQ ID NO: 182273 - DNA, 10 bp, Unknown
  misc_feature (1)..( 10): Result.005 file - promoters50/3011901
tttaaaaaat

SEQ ID NO: 182274 - DNA, 10 bp, Unknown
  misc_feature (1)..( 10): Result.005 file - promoters50/3011901
cttaaaaggg

SEQ ID NO: 182275 - DNA, 10 bp, Unknown
  misc_feature (1)..( 10): Result.005 file - promoters50/3011901
tttaaaaaat

SEQ ID NO: 182276 - DNA, 12 bp, Unknown
  misc_feature (1)..( 12): Result.005 file - promoters50/3011901
tgggatatttta

SEQ ID NO: 182277 - DNA, 12 bp, Unknown
  misc_feature (1)..( 12): Result.005 file - promoters50/3011901
gatgatatatta

SEQ ID NO: 182278 - DNA, 12 bp, Unknown
  misc_feature (1)..( 12): Result.005 file - promoters50/3011901
tgagataataat

SEQ ID NO: 182279 - DNA, 8 bp, Unknown
  misc_feature (1)..( 8): Result.005 file - promoters50/3020615
ctttatgc

SEQ ID NO: 182280 - DNA, 8 bp, Unknown
  misc_feature (1)..( 8): Result.005 file - promoters50/3020615
ctttttgc

SEQ ID NO: 182281 - DNA, 8 bp, Unknown
  misc_feature (1)..( 8): Result.005 file - promoters50/3020615
ctttttat

SEQ ID NO: 182282 - DNA, 9 bp, Unknown
  misc_feature (1)..( 9): Result.005 file - promoters50/3036674
aaaaagaaa

SEQ ID NO: 182283 - DNA, 9 bp, Unknown
  misc_feature (1)..( 9): Result.005 file - promoters50/3036674
caaaacaaa

SEQ ID NO: 182284 - DNA, 9 bp, Unknown
  misc_feature (1)..( 9): Result.005 file - promoters50/3036674
caaaaccac

SEQ ID NO: 182285 - DNA, 12 bp, Unknown
  misc_feature (1)..( 12): Result.005 file - promoters50/3043322
ttctaaaatctt

SEQ ID NO: 182286 - DNA, 12 bp, Unknown
  misc_feature (1)..( 12): Result.005 file - promoters50/3043322
caataaaatcct

SEQ ID NO: 182287 - DNA, 12 bp, Unknown
  misc_feature (1)..( 12): Result.005 file - promoters50/3043322
acaaaaaatcat

SEQ ID NO: 182288 - DNA, 12 bp, Unknown
  misc_feature (1)..( 12): Result.005 file - promoters50/3043322
aaataaaattaa

SEQ ID NO: 182289 - DNA, 12 bp, Unknown
  misc_feature (1)..( 12): Result.005 file - promoters50/3043322
caaaaaaaaaaa

SEQ ID NO: 182290 - DNA, 12 bp, Unknown
  misc_feature (1)..( 12): Result.005 file - promoters50/3043322
ttagaaaatcat

SEQ ID NO: 182291 - DNA, 16 bp, Unknown
  misc_feature (1)..( 16): Result.005 file - promoters50/3043322
aaaacctgaattttaa

SEQ ID NO: 182292 - DNA, 16 bp, Unknown
  misc_feature (1)..( 16): Result.005 file - promoters50/3043322
ggctatccaatttttt

SEQ ID NO: 182293 - DNA, 16 bp, Unknown
  misc_feature (1)..( 16): Result.005 file - promoters50/3043322
aattctaaaatttcta

SEQ ID NO: 182294 - DNA, 16 bp, Unknown
  misc_feature (1)..( 16): Result.005 file - promoters50/3043322
ttgttacaaattttct

SEQ ID NO: 182295 - DNA, 16 bp, Unknown
  misc_feature (1)..( 16): Result.005 file - promoters50/3043322
acctaacatatttttt

SEQ ID NO: 182296 - DNA, 16 bp, Unknown
  misc_feature (1)..( 16): Result.005 file - promoters50/3043322
gatgactccatttttg

SEQ ID NO: 182297 - DNA, 16 bp, Unknown
  misc_feature (1)..( 16): Result.005 file - promoters50/3043322
agttgttcaattctcc

SEQ ID NO: 182298 - DNA, 13 bp, Unknown
  misc_feature (1)..( 13): Result.005 file - promoters50/3043322
gaaaaaaaaatat

SEQ ID NO: 182299 - DNA, 13 bp, Unknown
  misc_feature (1)..( 13): Result.005 file - promoters50/3043322
caaaacaaatcat

SEQ ID NO: 182300 - DNA, 13 bp, Unknown
  misc_feature (1)..( 13): Result.005 file - promoters50/3043322
gaataaatgacat

SEQ ID NO: 182301 - DNA, 13 bp, Unknown
  misc_feature (1)..( 13): Result.005 file - promoters50/3043322
tgttacaaatttt

SEQ ID NO: 182302 - DNA, 13 bp, Unknown
  misc_feature (1)..( 13): Result.005 file - promoters50/3043322
gaaatcaagatca

SEQ ID NO: 182303 - DNA, 13 bp, Unknown
  misc_feature (1)..( 13): Result.005 file - promoters50/3043322
agaagcaattttt

SEQ ID NO: 182304 - DNA, 11 bp, Unknown
  misc_feature (1)..( 11): Result.005 file - promoters50/3043962
cttctatataa

SEQ ID NO: 182305 - DNA, 11 bp, Unknown
  misc_feature (1)..( 11): Result.005 file - promoters50/3043962
aaactatttaa

SEQ ID NO: 182306 - DNA, 11 bp, Unknown
  misc_feature (1)..( 11): Result.005 file - promoters50/3043962
tgactattatc

SEQ ID NO: 182307 - DNA, 11 bp, Unknown
  misc_feature (1)..( 11): Result.005 file - promoters50/3043962
aacctagttac

SEQ ID NO: 182308 - DNA, 11 bp, Unknown
  misc_feature (1)..( 11): Result.005 file - promoters50/3043962
tgattatcctt

SEQ ID NO: 182309 - DNA, 11 bp, Unknown
  misc_feature (1)..( 11): Result.005 file - promoters50/3043962
ctactcttagg

SEQ ID NO: 182310 - DNA, 15 bp, Unknown
  misc_feature (1)..( 15): Result.005 file - promoters50/3043962
attcaataataatat

SEQ ID NO: 182311 - DNA, 15 bp, Unknown
  misc_feature (1)..( 15): Result.005 file - promoters50/3043962
ttttcataatcatat

SEQ ID NO: 182312 - DNA, 15 bp, Unknown
  misc_feature (1)..( 15): Result.005 file - promoters50/3043962
aaaactcaataatac

SEQ ID NO: 182313 - DNA, 15 bp, Unknown
  misc_feature (1)..( 15): Result.005 file - promoters50/3043962
ccaaacaaataataa

SEQ ID NO: 182314 - DNA, 15 bp, Unknown
  misc_feature (1)..( 15): Result.005 file - promoters50/3043962
ttttcttaatttaag

SEQ ID NO: 182315 - DNA, 15 bp, Unknown
  misc_feature (1)..( 15): Result.005 file - promoters50/3043962
agactaaaaaaatat

SEQ ID NO: 182316 - DNA, 10 bp, Unknown
  misc_feature (1)..( 10): Result.005 file - promoters50/3043962
tgacaatttt

SEQ ID NO: 182317 - DNA, 10 bp, Unknown
  misc_feature (1)..( 10): Result.005 file - promoters50/3043962
tgactattat

SEQ ID NO: 182318 - DNA, 10 bp, Unknown
  misc_feature (1)..( 10): Result.005 file - promoters50/3043962
aaactattta

SEQ ID NO: 182319 - DNA, 11 bp, Unknown
  misc_feature (1)..( 11): Result.005 file - promoters50/3043962
aacctagttac

SEQ ID NO: 182320 - DNA, 11 bp, Unknown
  misc_feature (1)..( 11): Result.005 file - promoters50/3043962
aaataaaatat

SEQ ID NO: 182321 - DNA, 11 bp, Unknown
  misc_feature (1)..( 11): Result.005 file - promoters50/3043962
gtgttgattat

SEQ ID NO: 182322 - DNA, 11 bp, Unknown
  misc_feature (1)..( 11): Result.005 file - promoters50/3043962
ctactcttagg

SEQ ID NO: 182323 - DNA, 10 bp, Unknown
  misc_feature (1)..( 10): Result.005 file - promoters50/3046192
atgaatctga

SEQ ID NO: 182324 - DNA, 10 bp, Unknown
  misc_feature (1)..( 10): Result.005 file - promoters50/3046192
agaaatctgt

SEQ ID NO: 182325 - DNA, 10 bp, Unknown
  misc_feature (1)..( 10): Result.005 file - promoters50/3046192
agaaatatgt

SEQ ID NO: 182326 - DNA, 10 bp, Unknown
  misc_feature (1)..( 10): Result.005 file - promoters50/3046192
ataaatcttg

SEQ ID NO: 182327 - DNA, 10 bp, Unknown
  misc_feature (1)..( 10): Result.005 file - promoters50/3046192
tataatttgt

SEQ ID NO: 182328 - DNA, 10 bp, Unknown
  misc_feature (1)..( 10): Result.005 file - promoters50/3046192
tgaaatatgt

SEQ ID NO: 182329 - DNA, 10 bp, Unknown
  misc_feature (1)..( 10): Result.005 file - promoters50/3046192
agaaatatgt

SEQ ID NO: 182330 - DNA, 10 bp, Unknown
  misc_feature (1)..( 10): Result.005 file - promoters50/3046192
tataatttgt

SEQ ID NO: 182331 - DNA, 10 bp, Unknown
  misc_feature (1)..( 10): Result.005 file - promoters50/3046192
tgaaatatgt

SEQ ID NO: 182332 - DNA, 10 bp, Unknown
  misc_feature (1)..( 10): Result.005 file - promoters50/3046192
agaaatctgt

SEQ ID NO: 182333 - DNA, 10 bp, Unknown
  misc_feature (1)..( 10): Result.005 file - promoters50/3046192
ataaatcttg

SEQ ID NO: 182334 - DNA, 10 bp, Unknown
  misc_feature (1)..( 10): Result.005 file - promoters50/3046192
agaaatggaa

SEQ ID NO: 182335 - DNA, 11 bp, Unknown
  misc_feature (1)..( 11): Result.005 file - promoters50/3062012
atatatatata

SEQ ID NO: 182336 - DNA, 11 bp, Unknown
  misc_feature (1)..( 11): Result.005 file - promoters50/3062012
atatttataat

SEQ ID NO: 182337 - DNA, 11 bp, Unknown
  misc_feature (1)..( 11): Result.005 file - promoters50/3062012
agattgataag

SEQ ID NO: 182338 - DNA, 11 bp, Unknown
  misc_feature (1)..( 11): Result.005 file - promoters50/3062012
ttaattaaaat

SEQ ID NO: 182339 - DNA, 14 bp, Unknown
  misc_feature (1)..( 14): Result.005 file - promoters50/3062012
taacaaatatatta

SEQ ID NO: 182340 - DNA, 14 bp, Unknown
  misc_feature (1)..( 14): Result.005 file - promoters50/3062012
tttcaaaaatatta

SEQ ID NO: 182341 - DNA, 14 bp, Unknown
  misc_feature (1)..( 14): Result.005 file - promoters50/3062012
actaaaatttatga

SEQ ID NO: 182342 - DNA, 14 bp, Unknown
  misc_feature (1)..( 14): Result.005 file - promoters50/3062012
tttaaaaaacattt

SEQ ID NO: 182343 - DNA, 14 bp, Unknown
  misc_feature (1)..( 14): Result.005 file - promoters50/3062012
ttttaaatgttgca

SEQ ID NO: 182344 - DNA, 12 bp, Unknown
  misc_feature (1)..( 12): Result.005 file - promoters50/3062012
tcaaatgaattt

SEQ ID NO: 182345 - DNA, 12 bp, Unknown
  misc_feature (1)..( 12): Result.005 file - promoters50/3062012
ataaattaatac

SEQ ID NO: 182346 - DNA, 12 bp, Unknown
  misc_feature (1)..( 12): Result.005 file - promoters50/3062012
tttaataaattt

SEQ ID NO: 182347 - DNA, 12 bp, Unknown
  misc_feature (1)..( 12): Result.005 file - promoters50/3062012
taaaaataatat

SEQ ID NO: 182348 - DNA, 12 bp, Unknown
  misc_feature (1)..( 12): Result.005 file - promoters50/3062012
ttaaaaaagcat

SEQ ID NO: 182349 - DNA, 12 bp, Unknown
  misc_feature (1)..( 12): Result.005 file - promoters50/3062012
caaatgaattta

SEQ ID NO: 182350 - DNA, 12 bp, Unknown
  misc_feature (1)..( 12): Result.005 file - promoters50/3062012
ttgaaaaattta

SEQ ID NO: 182351 - DNA, 12 bp, Unknown
  misc_feature (1)..( 12): Result.005 file - promoters50/3062012
ttaataaatttt

SEQ ID NO: 182352 - DNA, 12 bp, Unknown
  misc_feature (1)..( 12): Result.005 file - promoters50/3062012
atgaaagattta

SEQ ID NO: 182353 - DNA, 12 bp, Unknown
  misc_feature (1)..( 12): Result.005 file - promoters50/3062012
ttaaaaaagcat

SEQ ID NO: 182354 - DNA, 8 bp, Unknown
  misc_feature (1)..( 8): Result.005 file - promoters50/3062012
aaaaaatc

SEQ ID NO: 182355 - DNA, 8 bp, Unknown
  misc_feature (1)..( 8): Result.005 file - promoters50/3062012
ttaaaatc

SEQ ID NO: 182356 - DNA, 8 bp, Unknown
  misc_feature (1)..( 8): Result.005 file - promoters50/3062012
ttataata

SEQ ID NO: 182357 - DNA, 8 bp, Unknown
  misc_feature (1)..( 8): Result.005 file - promoters50/3062012
ttaaaatt

SEQ ID NO: 182358 - DNA, 8 bp, Unknown
  misc_feature (1)..( 8): Result.005 file - promoters50/3062012
tgaaaatc

SEQ ID NO: 182359 - DNA, 11 bp, Unknown
  misc_feature (1)..( 11): Result.005 file - promoters50/3062012
tgaattaaaac

SEQ ID NO: 182360 - DNA, 11 bp, Unknown
  misc_feature (1)..( 11): Result.005 file - promoters50/3062012
ggaagtaaaga

SEQ ID NO: 182361 - DNA, 11 bp, Unknown
  misc_feature (1)..( 11): Result.005 file - promoters50/3062012
tgaaataaaac

SEQ ID NO: 182362 - DNA, 11 bp, Unknown
  misc_feature (1)..( 11): Result.005 file - promoters50/3062012
ttcatgaaaaa

SEQ ID NO: 182363 - DNA, 9 bp, Unknown
  misc_feature (1)..( 9): Result.005 file - promoters50/3062012
ctgaaaaaa

SEQ ID NO: 182364 - DNA, 9 bp, Unknown
  misc_feature (1)..( 9): Result.005 file - promoters50/3062012
attaaaaaa

SEQ ID NO: 182365 - DNA, 9 bp, Unknown
  misc_feature (1)..( 9): Result.005 file - promoters50/3062012
tttaataaa

SEQ ID NO: 182366 - DNA, 9 bp, Unknown
  misc_feature (1)..( 9): Result.005 file - promoters50/3062012
attcaaaat

SEQ ID NO: 182367 - DNA, 12 bp, Unknown
  misc_feature (1)..( 12): Result.005 file - promoters50/3062012
tcccatatttta

SEQ ID NO: 182368 - DNA, 12 bp, Unknown
  misc_feature (1)..( 12): Result.005 file - promoters50/3062012
tcccaaatttat

SEQ ID NO: 182369 - DNA, 12 bp, Unknown
  misc_feature (1)..( 12): Result.005 file - promoters50/3062012
taacatcttttt

SEQ ID NO: 182370 - DNA, 12 bp, Unknown
  misc_feature (1)..( 12): Result.005 file - promoters50/3062012
tttgaacttttt

SEQ ID NO: 182371 - DNA, 10 bp, Unknown
  misc_feature (1)..( 10): Result.005 file - promoters50/3062012
tttattgtaa

SEQ ID NO: 182372 - DNA, 10 bp, Unknown
  misc_feature (1)..( 10): Result.005 file - promoters50/3062012
tttatttaaa

SEQ ID NO: 182373 - DNA, 10 bp, Unknown
  misc_feature (1)..( 10): Result.005 file - promoters50/3062012
ttttttttac

SEQ ID NO: 182374 - DNA, 10 bp, Unknown
  misc_feature (1)..( 10): Result.005 file - promoters50/3062012
tttttaacat

SEQ ID NO: 182375 - DNA, 11 bp, Unknown
  misc_feature (1)..( 11): Result.005 file - promoters50/3062012
attgtaaaatc

SEQ ID NO: 182376 - DNA, 11 bp, Unknown
  misc_feature (1)..( 11): Result.005 file - promoters50/3062012
tatttaaaata

SEQ ID NO: 182377 - DNA, 11 bp, Unknown
  misc_feature (1)..( 11): Result.005 file - promoters50/3062012
tttttaacatc

SEQ ID NO: 182378 - DNA, 11 bp, Unknown
  misc_feature (1)..( 11): Result.005 file - promoters50/3062012
ttttttacata

SEQ ID NO: 182379 - DNA, 8 bp, Unknown
  misc_feature (1)..( 8): Result.005 file - promoters50/3062012
aatcaaac

SEQ ID NO: 182380 - DNA, 8 bp, Unknown
  misc_feature (1)..( 8): Result.005 file - promoters50/3062012
catcaaat

SEQ ID NO: 182381 - DNA, 8 bp, Unknown
  misc_feature (1)..( 8): Result.005 file - promoters50/3062012
aattaaaa

SEQ ID NO: 182382 - DNA, 9 bp, Unknown
  misc_feature (1)..( 9): Result.005 file - promoters50/3062012
atttataat

SEQ ID NO: 182383 - DNA, 9 bp, Unknown
  misc_feature (1)..( 9): Result.005 file - promoters50/3062012
aaaatttga

SEQ ID NO: 182384 - DNA, 9 bp, Unknown
  misc_feature (1)..( 9): Result.005 file - promoters50/3062012
aaaattcat

SEQ ID NO: 182385 - DNA, 9 bp, Unknown
  misc_feature (1)..( 9): Result.005 file - promoters50/3062012
aaaatttat

SEQ ID NO: 182386 - DNA, 9 bp, Unknown
  misc_feature (1)..( 9): Result.005 file - promoters50/3062012
ttaatttat

SEQ ID NO: 182387 - DNA, 14 bp, Unknown
  misc_feature (1)..( 14): Result.005 file - promoters50/3062012
ccgtaacaaatata

SEQ ID NO: 182388 - DNA, 14 bp, Unknown
  misc_feature (1)..( 14): Result.005 file - promoters50/3062012
atttaaaaaacatt

SEQ ID NO: 182389 - DNA, 14 bp, Unknown
  misc_feature (1)..( 14): Result.005 file - promoters50/3062012
ttttcaaaaatatt

SEQ ID NO: 182390 - DNA, 14 bp, Unknown
  misc_feature (1)..( 14): Result.005 file - promoters50/3062012
ttttaaatgttgca

SEQ ID NO: 182391 - DNA, 14 bp, Unknown
  misc_feature (1)..( 14): Result.005 file - promoters50/3062012
ttttcaaaaatatt

SEQ ID NO: 182392 - DNA, 14 bp, Unknown
  misc_feature (1)..( 14): Result.005 file - promoters50/3062012
ttttcatgtatggt

SEQ ID NO: 182393 - DNA, 14 bp, Unknown
  misc_feature (1)..( 14): Result.005 file - promoters50/3062012
atttaaaaaacatt

SEQ ID NO: 182394 - DNA, 14 bp, Unknown
  misc_feature (1)..( 14): Result.005 file - promoters50/3062012
ttttattctctcta

SEQ ID NO: 182395 - DNA, 11 bp, Unknown
  misc_feature (1)..( 11): Result.005 file - promoters50/3238306
gttttggcgtt

SEQ ID NO: 182396 - DNA, 11 bp, Unknown
  misc_feature (1)..( 11): Result.005 file - promoters50/3238306
gtttgggcgag

SEQ ID NO: 182397 - DNA, 11 bp, Unknown
  misc_feature (1)..( 11): Result.005 file - promoters50/3238306
gatggggtgag

SEQ ID NO: 182398 - DNA, 8 bp, Unknown
  misc_feature (1)..( 8): Result.005 file - promoters50/3238306
taaattat

SEQ ID NO: 182399 - DNA, 8 bp, Unknown
  misc_feature (1)..( 8): Result.005 file - promoters50/3238306
aaaaatat

SEQ ID NO: 182400 - DNA, 8 bp, Unknown
  misc_feature (1)..( 8): Result.005 file - promoters50/3238306
aaaaatcc

SEQ ID NO: 182401 - DNA, 7 bp, Unknown
  misc_feature (1)..( 7): Result.005 file - promoters50/3238306
gattaat

SEQ ID NO: 182402 - DNA, 7 bp, Unknown
  misc_feature (1)..( 7): Result.005 file - promoters50/3238306
gatcaat

SEQ ID NO: 182403 - DNA, 7 bp, Unknown
  misc_feature (1)..( 7): Result.005 file - promoters50/3238306
gattaag

SEQ ID NO: 182404 - DNA, 8 bp, Unknown
  misc_feature (1)..( 8): Result.005 file - promoters50/3238306
gttggata

SEQ ID NO: 182405 - DNA, 8 bp, Unknown
  misc_feature (1)..( 8): Result.005 file - promoters50/3238306
gttggaga

SEQ ID NO: 182406 - DNA, 8 bp, Unknown
  misc_feature (1)..( 8): Result.005 file - promoters50/3238306
cttggaga

SEQ ID NO: 182407 - DNA, 10 bp, Unknown
  misc_feature (1)..( 10): Result.005 file - promoters50/3239163
aagtgttctg

SEQ ID NO: 182408 - DNA, 10 bp, Unknown
  misc_feature (1)..( 10): Result.005 file - promoters50/3239163
aagtgtggta

SEQ ID NO: 182409 - DNA, 10 bp, Unknown
  misc_feature (1)..( 10): Result.005 file - promoters50/3239163
tagtgtgtga

SEQ ID NO: 182410 - DNA, 10 bp, Unknown
  misc_feature (1)..( 10): Result.005 file - promoters50/3239163
aggtgtctga

SEQ ID NO: 182411 - DNA, 7 bp, Unknown
  misc_feature (1)..( 7): Result.005 file - promoters50/3239163
gatatat

SEQ ID NO: 182412 - DNA, 7 bp, Unknown
  misc_feature (1)..( 7): Result.005 file - promoters50/3239163
aatatat

SEQ ID NO: 182413 - DNA, 7 bp, Unknown
  misc_feature (1)..( 7): Result.005 file - promoters50/3239163
aatataa

SEQ ID NO: 182414 - DNA, 9 bp, Unknown
  misc_feature (1)..( 9): Result.005 file - promoters50/3239163
atacacata

SEQ ID NO: 182415 - DNA, 9 bp, Unknown
  misc_feature (1)..( 9): Result.005 file - promoters50/3239163
atacaaata

SEQ ID NO: 182416 - DNA, 9 bp, Unknown
  misc_feature (1)..( 9): Result.005 file - promoters50/3239163
tgtcacata

SEQ ID NO: 182417 - DNA, 8 bp, Unknown
  misc_feature (1)..( 8): Result.005 file - promoters50/3239175
gaaagaca

SEQ ID NO: 182418 - DNA, 8 bp, Unknown
  misc_feature (1)..( 8): Result.005 file - promoters50/3239175
gaaagaaa

SEQ ID NO: 182419 - DNA, 8 bp, Unknown
  misc_feature (1)..( 8): Result.005 file - promoters50/3239175
caaaaaca

SEQ ID NO: 182420 - DNA, 9 bp, Unknown
  misc_feature (1)..( 9): Result.005 file - promoters50/3239175
aaaggaaga

SEQ ID NO: 182421 - DNA, 9 bp, Unknown
  misc_feature (1)..( 9): Result.005 file - promoters50/3239175
aaaagaaaa

SEQ ID NO: 182422 - DNA, 9 bp, Unknown
  misc_feature (1)..( 9): Result.005 file - promoters50/3239175
aaagtaaag

SEQ ID NO: 182423 - DNA, 9 bp, Unknown
  misc_feature (1)..( 9): Result.005 file - promoters50/3239175
gagaataac

SEQ ID NO: 182424 - DNA, 9 bp, Unknown
  misc_feature (1)..( 9): Result.005 file - promoters50/3239175
gagtatata

SEQ ID NO: 182425 - DNA, 9 bp, Unknown
  misc_feature (1)..( 9): Result.005 file - promoters50/3239175
ttgtatata

SEQ ID NO: 182426 - DNA, 10 bp, Unknown
  misc_feature (1)..( 10): Result.005 file - promoters50/3245308
accaatatca

SEQ ID NO: 182427 - DNA, 10 bp, Unknown
  misc_feature (1)..( 10): Result.005 file - promoters50/3245308
ttcaatttca

SEQ ID NO: 182428 - DNA, 10 bp, Unknown
  misc_feature (1)..( 10): Result.005 file - promoters50/3245308
ttcaattttt

SEQ ID NO: 182429 - DNA, 7 bp, Unknown
  misc_feature (1)..( 7): Result.005 file - promoters50/3245308
aaattag

SEQ ID NO: 182430 - DNA, 7 bp, Unknown
  misc_feature (1)..( 7): Result.005 file - promoters50/3245308
gaattag

SEQ ID NO: 182431 - DNA, 7 bp, Unknown
  misc_feature (1)..( 7): Result.005 file - promoters50/3245308
aaattaa

SEQ ID NO: 182432 - DNA, 7 bp, Unknown
  misc_feature (1)..( 7): Result.005 file - promoters50/3245308
aagtgtt

SEQ ID NO: 182433 - DNA, 7 bp, Unknown
  misc_feature (1)..( 7): Result.005 file - promoters50/3245308
tagtgtt

SEQ ID NO: 182434 - DNA, 7 bp, Unknown
  misc_feature (1)..( 7): Result.005 file - promoters50/3245308
tagagtt

SEQ ID NO: 182435 - DNA, 7 bp, Unknown
  misc_feature (1)..( 7): Result.005 file - promoters50/3245308
ttcaatt

SEQ ID NO: 182436 - DNA, 7 bp, Unknown
  misc_feature (1)..( 7): Result.005 file - promoters50/3245308
ttctatt

SEQ ID NO: 182437 - DNA, 7 bp, Unknown
  misc_feature (1)..( 7): Result.005 file - promoters50/3245308
ttcaatt

SEQ ID NO: 182438 - DNA, 10 bp, Unknown
  misc_feature (1)..( 10): Result.005 file - promoters50/3245330
tggttgattt

SEQ ID NO: 182439 - DNA, 10 bp, Unknown
  misc_feature (1)..( 10): Result.005 file - promoters50/3245330
atgttaattc

SEQ ID NO: 182440 - DNA, 10 bp, Unknown
  misc_feature (1)..( 10): Result.005 file - promoters50/3245330
cttttgtttt

SEQ ID NO: 182441 - DNA, 10 bp, Unknown
  misc_feature (1)..( 10): Result.005 file - promoters50/3245330
ctgttgattt

SEQ ID NO: 182442 - DNA, 10 bp, Unknown
  misc_feature (1)..( 10): Result.005 file - promoters50/3245330
atggtaaaaa

SEQ ID NO: 182443 - DNA, 10 bp, Unknown
  misc_feature (1)..( 10): Result.005 file - promoters50/3245330
atgataaaac

SEQ ID NO: 182444 - DNA, 9 bp, Unknown
  misc_feature (1)..( 9): Result.005 file - promoters50/3245330
attcttttt

SEQ ID NO: 182445 - DNA, 9 bp, Unknown
  misc_feature (1)..( 9): Result.005 file - promoters50/3245330
aatctttta

SEQ ID NO: 182446 - DNA, 10 bp, Unknown
  misc_feature (1)..( 10): Result.005 file - promoters50/3245330
attcattttt

SEQ ID NO: 182447 - DNA, 10 bp, Unknown
  misc_feature (1)..( 10): Result.005 file - promoters50/3245330
actcttttaa

SEQ ID NO: 182448 - DNA, 10 bp, Unknown
  misc_feature (1)..( 10): Result.005 file - promoters50/3245330
cttaagttca

SEQ ID NO: 182449 - DNA, 13 bp, Unknown
  misc_feature (1)..( 13): Result.005 file - promoters50/3408983
aatgtgatttacg

SEQ ID NO: 182450 - DNA, 13 bp, Unknown
  misc_feature (1)..( 13): Result.005 file - promoters50/3408983
aatatgaatttgc

SEQ ID NO: 182451 - DNA, 13 bp, Unknown
  misc_feature (1)..( 13): Result.005 file - promoters50/3408983
attgtgttttacg

SEQ ID NO: 182452 - DNA, 11 bp, Unknown
  misc_feature (1)..( 11): Result.005 file - promoters50/3409019
ttttaaagatg

SEQ ID NO: 182453 - DNA, 11 bp, Unknown
  misc_feature (1)..( 11): Result.005 file - promoters50/3409019
tttgaaacata

SEQ ID NO: 182454 - DNA, 11 bp, Unknown
  misc_feature (1)..( 11): Result.005 file - promoters50/3409019
tttgattttga

SEQ ID NO: 182455 - DNA, 8 bp, Unknown
  misc_feature (1)..( 8): Result.005 file - promoters50/3409052
tataaaaa

SEQ ID NO: 182456 - DNA, 8 bp, Unknown
  misc_feature (1)..( 8): Result.005 file - promoters50/3409052
tatagaaa

SEQ ID NO: 182457 - DNA, 8 bp, Unknown
  misc_feature (1)..( 8): Result.005 file - promoters50/3409052
tataaaaa

SEQ ID NO: 182458 - DNA, 8 bp, Unknown
  misc_feature (1)..( 8): Result.005 file - promoters50/3409052
taaaaata

SEQ ID NO: 182459 - DNA, 8 bp, Unknown
  misc_feature (1)..( 8): Result.005 file - promoters50/3409052
taaaaagt

SEQ ID NO: 182460 - DNA, 8 bp, Unknown
  misc_feature (1)..( 8): Result.005 file - promoters50/3409052
aaaaaagt

SEQ ID NO: 182461 - DNA, 12 bp, Unknown
  misc_feature (1)..( 12): Result.005 file - promoters50/3409075
aggtttatatga

SEQ ID NO: 182462 - DNA, 12 bp, Unknown
  misc_feature (1)..( 12): Result.005 file - promoters50/3409075
tgcattatgtga

SEQ ID NO: 182463 - DNA, 12 bp, Unknown
  misc_feature (1)..( 12): Result.005 file - promoters50/3409075
atttttatacat

SEQ ID NO: 182464 - DNA, 12 bp, Unknown
  misc_feature (1)..( 12): Result.005 file - promoters50/3409075
tgatttatgttc

SEQ ID NO: 182465 - DNA, 12 bp, Unknown
  misc_feature (1)..( 12): Result.005 file - promoters50/3409075
atttgtatacca

SEQ ID NO: 182466 - DNA, 12 bp, Unknown
  misc_feature (1)..( 12): Result.005 file - promoters50/3409075
atttgtttgctg

SEQ ID NO: 182467 - DNA, 10 bp, Unknown
  misc_feature (1)..( 10): Result.005 file - promoters50/3409075
agttttatta

SEQ ID NO: 182468 - DNA, 10 bp, Unknown
  misc_feature (1)..( 10): Result.005 file - promoters50/3409075
tcttttatgt

SEQ ID NO: 182469 - DNA, 10 bp, Unknown
  misc_feature (1)..( 10): Result.005 file - promoters50/3409075
aatttaatgt

SEQ ID NO: 182470 - DNA, 10 bp, Unknown
  misc_feature (1)..( 10): Result.005 file - promoters50/3409075
tcttttaata

SEQ ID NO: 182471 - DNA, 10 bp, Unknown
  misc_feature (1)..( 10): Result.005 file - promoters50/3409075
atatttatgc

SEQ ID NO: 182472 - DNA, 10 bp, Unknown
  misc_feature (1)..( 10): Result.005 file - promoters50/3409075
tatttttgtt

SEQ ID NO: 182473 - DNA, 11 bp, Unknown
  misc_feature (1)..( 11): Result.005 file - promoters50/3409075
gaattgaactt

SEQ ID NO: 182474 - DNA, 11 bp, Unknown
  misc_feature (1)..( 11): Result.005 file - promoters50/3409075
gaattgagaga

SEQ ID NO: 182475 - DNA, 11 bp, Unknown
  misc_feature (1)..( 11): Result.005 file - promoters50/3409075
gaatcgaaccc

SEQ ID NO: 182476 - DNA, 11 bp, Unknown
  misc_feature (1)..( 11): Result.005 file - promoters50/3409075
gaatggaaaac

SEQ ID NO: 182477 - DNA, 11 bp, Unknown
  misc_feature (1)..( 11): Result.005 file - promoters50/3409075
tgatttagaga

SEQ ID NO: 182478 - DNA, 11 bp, Unknown
  misc_feature (1)..( 11): Result.005 file - promoters50/3409075
acttcgagccc

SEQ ID NO: 182479 - DNA, 13 bp, Unknown
  misc_feature (1)..( 13): Result.005 file - promoters50/3409075
cttctaattatat

SEQ ID NO: 182480 - DNA, 13 bp, Unknown
  misc_feature (1)..( 13): Result.005 file - promoters50/3409075
cttttaatagcac

SEQ ID NO: 182481 - DNA, 13 bp, Unknown
  misc_feature (1)..( 13): Result.005 file - promoters50/3409075
catttaatctttt

SEQ ID NO: 182482 - DNA, 13 bp, Unknown
  misc_feature (1)..( 13): Result.005 file - promoters50/3409075
aattaaatattca

SEQ ID NO: 182483 - DNA, 13 bp, Unknown
  misc_feature (1)..( 13): Result.005 file - promoters50/3409075
agattaatatttt

SEQ ID NO: 182484 - DNA, 13 bp, Unknown
  misc_feature (1)..( 13): Result.005 file - promoters50/3409075
aatttaatgtcta

SEQ ID NO: 182485 - DNA, 10 bp, Unknown
  misc_feature (1)..( 10): Result.005 file - promoters50/3409141
aagcaaaaag

SEQ ID NO: 182486 - DNA, 10 bp, Unknown
  misc_feature (1)..( 10): Result.005 file - promoters50/3409141
aagcaaaaaa

SEQ ID NO: 182487 - DNA, 10 bp, Unknown
  misc_feature (1)..( 10): Result.005 file - promoters50/3409141
tagtaaaaaa

SEQ ID NO: 182488 - DNA, 9 bp, Unknown
  misc_feature (1)..( 9): Result.005 file - promoters50/3409141
atttatatg

SEQ ID NO: 182489 - DNA, 9 bp, Unknown
  misc_feature (1)..( 9): Result.005 file - promoters50/3409141
ctttataga

SEQ ID NO: 182490 - DNA, 9 bp, Unknown
  misc_feature (1)..( 9): Result.005 file - promoters50/3409141
cttcataga

SEQ ID NO: 182491 - DNA, 7 bp, Unknown
  misc_feature (1)..( 7): Result.005 file - promoters50/3409141
taaatct

SEQ ID NO: 182492 - DNA, 7 bp, Unknown
  misc_feature (1)..( 7): Result.005 file - promoters50/3409141
caaatct

SEQ ID NO: 182493 - DNA, 7 bp, Unknown
  misc_feature (1)..( 7): Result.005 file - promoters50/3409141
taactct

SEQ ID NO: 182494 - DNA, 9 bp, Unknown
  misc_feature (1)..( 9): Result.005 file - promoters50/3409141
cgttcaaat

SEQ ID NO: 182495 - DNA, 9 bp, Unknown
  misc_feature (1)..( 9): Result.005 file - promoters50/3409141
ttttcaaat

SEQ ID NO: 182496 - DNA, 10 bp, Unknown
  misc_feature (1)..( 10): Result.005 file - promoters50/3409141
ttttacaagt

SEQ ID NO: 182497 - DNA, 7 bp, Unknown
  misc_feature (1)..( 7): Result.005 file - promoters50/3409141
taaaata

SEQ ID NO: 182498 - DNA, 7 bp, Unknown
  misc_feature (1)..( 7): Result.005 file - promoters50/3409141
taaaatc

SEQ ID NO: 182499 - DNA, 7 bp, Unknown
  misc_feature (1)..( 7): Result.005 file - promoters50/3409141
caaaatc

SEQ ID NO: 182500 - DNA, 6 bp, Unknown
  misc_feature (1)..( 6): Result.005 file - promoters50/3409141
aaaaaa

SEQ ID NO: 182501 - DNA, 6 bp, Unknown
  misc_feature (1)..( 6): Result.005 file - promoters50/3409141
aaaaaa

SEQ ID NO: 182502 - DNA, 6 bp, Unknown
  misc_feature (1)..( 6): Result.005 file - promoters50/3409141
aaaaaa

SEQ ID NO: 182503 - DNA, 7 bp, Unknown
  misc_feature (1)..( 7): Result.005 file - promoters50/3409141
ttttttt

SEQ ID NO: 182504 - DNA, 7 bp, Unknown
  misc_feature (1)..( 7): Result.005 file - promoters50/3409141
tttttta

SEQ ID NO: 182505 - DNA, 7 bp, Unknown
  misc_feature (1)..( 7): Result.005 file - promoters50/3409141
tttatta

SEQ ID NO: 182506 - DNA, 10 bp, Unknown
  misc_feature (1)..( 10): Result.005 file - promoters50/3409141
tttttatata

SEQ ID NO: 182507 - DNA, 10 bp, Unknown
  misc_feature (1)..( 10): Result.005 file - promoters50/3409141
ttttaataac

SEQ ID NO: 182508 - DNA, 10 bp, Unknown
  misc_feature (1)..( 10): Result.005 file - promoters50/3409141
ttttactaac

SEQ ID NO: 182509 - DNA, 11 bp, Unknown
  misc_feature (1)..( 11): Result.005 file - promoters50/3409161
ataaagttcac

SEQ ID NO: 182510 - DNA, 11 bp, Unknown
  misc_feature (1)..( 11): Result.005 file - promoters50/3409161
gaaaaattcaa

SEQ ID NO: 182511 - DNA, 11 bp, Unknown
  misc_feature (1)..( 11): Result.005 file - promoters50/3409161
ataaagtttgg

SEQ ID NO: 182512 - DNA, 11 bp, Unknown
  misc_feature (1)..( 11): Result.005 file - promoters50/3409161
acaaacttcca

SEQ ID NO: 182513 - DNA, 11 bp, Unknown
  misc_feature (1)..( 11): Result.005 file - promoters50/3409161
ttaaattttgg

SEQ ID NO: 182514 - DNA, 11 bp, Unknown
  misc_feature (1)..( 11): Result.005 file - promoters50/3409161
gcaaatgttgg

SEQ ID NO: 182515 - DNA, 11 bp, Unknown
  misc_feature (1)..( 11): Result.005 file - promoters50/3409165
acaaacaactc

SEQ ID NO: 182516 - DNA, 11 bp, Unknown
  misc_feature (1)..( 11): Result.005 file - promoters50/3409165
tcaatcaaact

SEQ ID NO: 182517 - DNA, 11 bp, Unknown
  misc_feature (1)..( 11): Result.005 file - promoters50/3409165
ataaaaaactc

SEQ ID NO: 182518 - DNA, 11 bp, Unknown
  misc_feature (1)..( 11): Result.005 file - promoters50/3409165
ggaaacactta

SEQ ID NO: 182519 - DNA, 11 bp, Unknown
  misc_feature (1)..( 11): Result.005 file - promoters50/3409165
tcaaccaacta

SEQ ID NO: 182520 - DNA, 11 bp, Unknown
  misc_feature (1)..( 11): Result.005 file - promoters50/3409165
ccaatcacaac

SEQ ID NO: 182521 - DNA, 12 bp, Unknown
  misc_feature (1)..( 12): Result.005 file - promoters50/3409165
atttttattcta

SEQ ID NO: 182522 - DNA, 12 bp, Unknown
  misc_feature (1)..( 12): Result.005 file - promoters50/3409165
tgtttgattgaa

SEQ ID NO: 182523 - DNA, 12 bp, Unknown
  misc_feature (1)..( 12): Result.005 file - promoters50/3409165
agatttatttcg

SEQ ID NO: 182524 - DNA, 12 bp, Unknown
  misc_feature (1)..( 12): Result.005 file - promoters50/3409165
atttttaccata

SEQ ID NO: 182525 - DNA, 12 bp, Unknown
  misc_feature (1)..( 12): Result.005 file - promoters50/3409165
caattaatctca

SEQ ID NO: 182526 - DNA, 12 bp, Unknown
  misc_feature (1)..( 12): Result.005 file - promoters50/3409165
acagaaatgtca

SEQ ID NO: 182527 - DNA, 12 bp, Unknown
  misc_feature (1)..( 12): Result.005 file - promoters50/3409191
gtttgtatgcag

SEQ ID NO: 182528 - DNA, 12 bp, Unknown
  misc_feature (1)..( 12): Result.005 file - promoters50/3409191
gtttgaatggta

SEQ ID NO: 182529 - DNA, 12 bp, Unknown
  misc_feature (1)..( 12): Result.005 file - promoters50/3409191
ctttctattcag

SEQ ID NO: 182530 - DNA, 14 bp, Unknown
  misc_feature (1)..( 14): Result.005 file - promoters50/3409214
ctgttgacaattag

SEQ ID NO: 182531 - DNA, 14 bp, Unknown
  misc_feature (1)..( 14): Result.005 file - promoters50/3409214
cctccgtcaagtag

SEQ ID NO: 182532 - DNA, 14 bp, Unknown
  misc_feature (1)..( 14): Result.005 file - promoters50/3409214
ttttctacaattta

SEQ ID NO: 182533 - DNA, 14 bp, Unknown
  misc_feature (1)..( 14): Result.005 file - promoters50/3409214
ttttctaaaataat

SEQ ID NO: 182534 - DNA, 14 bp, Unknown
  misc_feature (1)..( 14): Result.005 file - promoters50/3409214
atgtttaaaataaa

SEQ ID NO: 182535 - DNA, 9 bp, Unknown
  misc_feature (1)..( 9): Result.005 file - promoters50/3409390
agtatttac

SEQ ID NO: 182536 - DNA, 7 bp, Unknown
  misc_feature (1)..( 7): Result.005 file - promoters50/3409390
tatttaa

SEQ ID NO: 182537 - DNA, 9 bp, Unknown
  misc_feature (1)..( 9): Result.005 file - promoters50/3409390
agtttttga

SEQ ID NO: 182538 - DNA, 9 bp, Unknown
  misc_feature (1)..( 9): Result.005 file - promoters50/3409390
aatatttac

SEQ ID NO: 182539 - DNA, 9 bp, Unknown
  misc_feature (1)..( 9): Result.005 file - promoters50/3409390
cgttttttt

SEQ ID NO: 182540 - DNA, 7 bp, Unknown
  misc_feature (1)..( 7): Result.005 file - promoters50/3409390
ttttttt

SEQ ID NO: 182541 - DNA, 11 bp, Unknown
  misc_feature (1)..( 11): Result.005 file - promoters50/3409390
gttttttaatt

SEQ ID NO: 182542 - DNA, 11 bp, Unknown
  misc_feature (1)..( 11): Result.005 file - promoters50/3409390
aaagtttaata

SEQ ID NO: 182543 - DNA, 12 bp, Unknown
  misc_feature (1)..( 12): Result.005 file - promoters50/3409390
gattttataata

SEQ ID NO: 182544 - DNA, 12 bp, Unknown
  misc_feature (1)..( 12): Result.005 file - promoters50/3409390
ttctttttaatt

SEQ ID NO: 182545 - DNA, 12 bp, Unknown
  misc_feature (1)..( 12): Result.005 file - promoters50/3409390
tattttataggt

SEQ ID NO: 182546 - DNA, 12 bp, Unknown
  misc_feature (1)..( 12): Result.005 file - promoters50/3409390
ctcattttaaca

SEQ ID NO: 182547 - DNA, 12 bp, Unknown
  misc_feature (1)..( 12): Result.005 file - promoters50/3409390
tatattataaca

SEQ ID NO: 182548 - DNA, 13 bp, Unknown
  misc_feature (1)..( 13): Result.005 file - promoters50/3409390
gcatgatataaat

SEQ ID NO: 182549 - DNA, 13 bp, Unknown
  misc_feature (1)..( 13): Result.005 file - promoters50/3409390
aaataatataaca

SEQ ID NO: 182550 - DNA, 13 bp, Unknown
  misc_feature (1)..( 13): Result.005 file - promoters50/3409390
aataattataaag

SEQ ID NO: 182551 - DNA, 13 bp, Unknown
  misc_feature (1)..( 13): Result.005 file - promoters50/3409390
atgttatatatta

SEQ ID NO: 182552 - DNA, 13 bp, Unknown
  misc_feature (1)..( 13): Result.005 file - promoters50/3409390
caattatataggt

SEQ ID NO: 182553 - DNA, 13 bp, Unknown
  misc_feature (1)..( 13): Result.005 file - promoters50/3409390
ttattttataggt

SEQ ID NO: 182554 - DNA, 13 bp, Unknown
  misc_feature (1)..( 13): Result.005 file - promoters50/3409390
tcattttaacatc

SEQ ID NO: 182555 - DNA, 11 bp, Unknown
  misc_feature (1)..( 11): Result.005 file - promoters50/3409390
tttttattttt

SEQ ID NO: 182556 - DNA, 11 bp, Unknown
  misc_feature (1)..( 11): Result.005 file - promoters50/3409390
actttatttta

SEQ ID NO: 182557 - DNA, 11 bp, Unknown
  misc_feature (1)..( 11): Result.005 file - promoters50/3409390
tcaacattttt

SEQ ID NO: 182558 - DNA, 11 bp, Unknown
  misc_feature (1)..( 11): Result.005 file - promoters50/3409390
attttataata

SEQ ID NO: 182559 - DNA, 11 bp, Unknown
  misc_feature (1)..( 11): Result.005 file - promoters50/3409390
tttttaattct

SEQ ID NO: 182560 - DNA, 11 bp, Unknown
  misc_feature (1)..( 11): Result.005 file - promoters50/3409390
tctatattata

SEQ ID NO: 182561 - DNA, 11 bp, Unknown
  misc_feature (1)..( 11): Result.005 file - promoters50/3409390
gttttttaatt

SEQ ID NO: 182562 - DNA, 11 bp, Unknown
  misc_feature (1)..( 11): Result.005 file - promoters50/3409390
attttttagta

SEQ ID NO: 182563 - DNA, 11 bp, Unknown
  misc_feature (1)..( 11): Result.005 file - promoters50/3409390
ttattttatag

SEQ ID NO: 182564 - DNA, 11 bp, Unknown
  misc_feature (1)..( 11): Result.005 file - promoters50/3409390
ctatattataa

SEQ ID NO: 182565 - DNA, 11 bp, Unknown
  misc_feature (1)..( 11): Result.005 file - promoters50/3409390
atttttttcac

SEQ ID NO: 182566 - DNA, 11 bp, Unknown
  misc_feature (1)..( 11): Result.005 file - promoters50/3409390
aataattataa

SEQ ID NO: 182567 - DNA, 14 bp, Unknown
  misc_feature (1)..( 14): Result.005 file - promoters50/3409390
aataatataacatc

SEQ ID NO: 182568 - DNA, 14 bp, Unknown
  misc_feature (1)..( 14): Result.005 file - promoters50/3409390
ctcattttaacatc

SEQ ID NO: 182569 - DNA, 14 bp, Unknown
  misc_feature (1)..( 14): Result.005 file - promoters50/3409390
tatattataacatt

SEQ ID NO: 182570 - DNA, 14 bp, Unknown
  misc_feature (1)..( 14): Result.005 file - promoters50/3409390
tattttataggtcc

SEQ ID NO: 182571 - DNA, 14 bp, Unknown
  misc_feature (1)..( 14): Result.005 file - promoters50/3409390
ataattataaagta

SEQ ID NO: 182572 - DNA, 14 bp, Unknown
  misc_feature (1)..( 14): Result.005 file - promoters50/3409390
acaattatataggt

SEQ ID NO: 182573 - DNA, 11 bp, Unknown
  misc_feature (1)..( 11): Result.005 file - promoters50/3409390
attatatatta

SEQ ID NO: 182574 - DNA, 11 bp, Unknown
  misc_feature (1)..( 11): Result.005 file - promoters50/3409390
attataaagta

SEQ ID NO: 182575 - DNA, 11 bp, Unknown
  misc_feature (1)..( 11): Result.005 file - promoters50/3409390
attatataggt

SEQ ID NO: 182576 - DNA, 11 bp, Unknown
  misc_feature (1)..( 11): Result.005 file - promoters50/3409390
attataacatt

SEQ ID NO: 182577 - DNA, 11 bp, Unknown
  misc_feature (1)..( 11): Result.005 file - promoters50/3409390
attttataggt

SEQ ID NO: 182578 - DNA, 11 bp, Unknown
  misc_feature (1)..( 11): Result.005 file - promoters50/3409390
attttaacatc

SEQ ID NO: 182579 - DNA, 9 bp, Unknown
  misc_feature (1)..( 9): Result.005 file - promoters50/3409489
ctatggtta

SEQ ID NO: 182580 - DNA, 9 bp, Unknown
  misc_feature (1)..( 9): Result.005 file - promoters50/3409489
aaatgatta

SEQ ID NO: 182581 - DNA, 9 bp, Unknown
  misc_feature (1)..( 9): Result.005 file - promoters50/3409489
ttatggtaa

SEQ ID NO: 182582 - DNA, 9 bp, Unknown
  misc_feature (1)..( 9): Result.005 file - promoters50/3409489
aaaggatta

SEQ ID NO: 182583 - DNA, 9 bp, Unknown
  misc_feature (1)..( 9): Result.005 file - promoters50/3409489
aaaagatgg

SEQ ID NO: 182584 - DNA, 9 bp, Unknown
  misc_feature (1)..( 9): Result.005 file - promoters50/3409489
acaagctgg

SEQ ID NO: 182585 - DNA, 11 bp, Unknown
  misc_feature (1)..( 11): Result.005 file - promoters50/3409631
ttttcttataa

SEQ ID NO: 182586 - DNA, 11 bp, Unknown
  misc_feature (1)..( 11): Result.005 file - promoters50/3409631
ttttctgatat

SEQ ID NO: 182587 - DNA, 11 bp, Unknown
  misc_feature (1)..( 11): Result.005 file - promoters50/3409631
ctatattataa

SEQ ID NO: 182588 - DNA, 11 bp, Unknown
  misc_feature (1)..( 11): Result.005 file - promoters50/3409637
catggataaag

SEQ ID NO: 182589 - DNA, 11 bp, Unknown
  misc_feature (1)..( 11): Result.005 file - promoters50/3409637
catggatttat

SEQ ID NO: 182590 - DNA, 11 bp, Unknown
  misc_feature (1)..( 11): Result.005 file - promoters50/3409637
tatgaattgaa

SEQ ID NO: 182591 - DNA, 11 bp, Unknown
  misc_feature (1)..( 11): Result.005 file - promoters50/3409637
tttggattttg

SEQ ID NO: 182592 - DNA, 11 bp, Unknown
  misc_feature (1)..( 11): Result.005 file - promoters50/3409637
attggatttaa

SEQ ID NO: 182593 - DNA, 11 bp, Unknown
  misc_feature (1)..( 11): Result.005 file - promoters50/3409637
ttttcatttaa

SEQ ID NO: 182594 - DNA, 16 bp, Unknown
  misc_feature (1)..( 16): Result.005 file - promoters50/3409637
ttttgttagttgtttg

SEQ ID NO: 182595 - DNA, 16 bp, Unknown
  misc_feature (1)..( 16): Result.005 file - promoters50/3409637
gacatatgattgtttt

SEQ ID NO: 182596 - DNA, 16 bp, Unknown
  misc_feature (1)..( 16): Result.005 file - promoters50/3409637
tattaacaattttttt

SEQ ID NO: 182597 - DNA, 15 bp, Unknown
  misc_feature (1)..( 15): Result.005 file - promoters50/3409637
atgtcaaatttgtct

SEQ ID NO: 182598 - DNA, 15 bp, Unknown
  misc_feature (1)..( 15): Result.005 file - promoters50/3409637
atgttaaattaaata

SEQ ID NO: 182599 - DNA, 16 bp, Unknown
  misc_feature (1)..( 16): Result.005 file - promoters50/3409637
agaacttccatgtttt

SEQ ID NO: 182600 - DNA, 16 bp, Unknown
  misc_feature (1)..( 16): Result.005 file - promoters50/3409637
aaggcaaagttggccg

SEQ ID NO: 182601 - DNA, 12 bp, Unknown
  misc_feature (1)..( 12): Result.005 file - promoters50/3409637
acaatttttttc

SEQ ID NO: 182602 - DNA, 12 bp, Unknown
  misc_feature (1)..( 12): Result.005 file - promoters50/3409637
ttaattttttga

SEQ ID NO: 182603 - DNA, 13 bp, Unknown
  misc_feature (1)..( 13): Result.005 file - promoters50/3409637
atgattgttttgg

SEQ ID NO: 182604 - DNA, 13 bp, Unknown
  misc_feature (1)..( 13): Result.005 file - promoters50/3409637
caaatttgtctca

SEQ ID NO: 182605 - DNA, 13 bp, Unknown
  misc_feature (1)..( 13): Result.005 file - promoters50/3409637
ccagtttatgaat

SEQ ID NO: 182606 - DNA, 13 bp, Unknown
  misc_feature (1)..( 13): Result.005 file - promoters50/3409637
catgtttttgctg

SEQ ID NO: 182607 - DNA, 13 bp, Unknown
  misc_feature (1)..( 13): Result.005 file - promoters50/3409637
caaagttggccgc

SEQ ID NO: 182608 - DNA, 9 bp, Unknown
  misc_feature (1)..( 9): Result.005 file - promoters50/3409637
tttggtttt

SEQ ID NO: 182609 - DNA, 9 bp, Unknown
  misc_feature (1)..( 9): Result.005 file - promoters50/3409637
ttttgtttc

SEQ ID NO: 182610 - DNA, 9 bp, Unknown
  misc_feature (1)..( 9): Result.005 file - promoters50/3409637
cttggttgg

SEQ ID NO: 182611 - DNA, 9 bp, Unknown
  misc_feature (1)..( 9): Result.005 file - promoters50/3409637
gttgatttt

SEQ ID NO: 182612 - DNA, 9 bp, Unknown
  misc_feature (1)..( 9): Result.005 file - promoters50/3409637
gtttatttg

SEQ ID NO: 182613 - DNA, 9 bp, Unknown
  misc_feature (1)..( 9): Result.005 file - promoters50/3409637
tgtggttgg

SEQ ID NO: 182614 - DNA, 15 bp, Unknown
  misc_feature (1)..( 15): Result.005 file - promoters50/3409637
gcttgaatcaatatt

SEQ ID NO: 182615 - DNA, 15 bp, Unknown
  misc_feature (1)..( 15): Result.005 file - promoters50/3409637
aattgattcaaaatt

SEQ ID NO: 182616 - DNA, 15 bp, Unknown
  misc_feature (1)..( 15): Result.005 file - promoters50/3409637
tcttaaatatttttc

SEQ ID NO: 182617 - DNA, 15 bp, Unknown
  misc_feature (1)..( 15): Result.005 file - promoters50/3409637
tctaaaaaggcagaa

SEQ ID NO: 182618 - DNA, 15 bp, Unknown
  misc_feature (1)..( 15): Result.005 file - promoters50/3409637
gccagaagctaagaa

SEQ ID NO: 182619 - DNA, 15 bp, Unknown
  misc_feature (1)..( 15): Result.005 file - promoters50/3409637
gtaaaaattatacca

SEQ ID NO: 182620 - DNA, 11 bp, Unknown
  misc_feature (1)..( 11): Result.005 file - promoters50/3409712
gaaaaagttca

SEQ ID NO: 182621 - DNA, 11 bp, Unknown
  misc_feature (1)..( 11): Result.005 file - promoters50/3409712
caaatagttcg

SEQ ID NO: 182622 - DNA, 11 bp, Unknown
  misc_feature (1)..( 11): Result.005 file - promoters50/3409712
gaaaaagtatg

SEQ ID NO: 182623 - DNA, 11 bp, Unknown
  misc_feature (1)..( 11): Result.005 file - promoters50/3409712
caaatatatct

SEQ ID NO: 182624 - DNA, 11 bp, Unknown
  misc_feature (1)..( 11): Result.005 file - promoters50/3409712
aaactaatcaa

SEQ ID NO: 182625 - DNA, 11 bp, Unknown
  misc_feature (1)..( 11): Result.005 file - promoters50/3409712
caactaaacaa

SEQ ID NO: 182626 - DNA, 13 bp, Unknown
  misc_feature (1)..( 13): Result.005 file - promoters50/3433703
ataattttacaat

SEQ ID NO: 182627 - DNA, 13 bp, Unknown
  misc_feature (1)..( 13): Result.005 file - promoters50/3433703
atactttatcgtc

SEQ ID NO: 182628 - DNA, 13 bp, Unknown
  misc_feature (1)..( 13): Result.005 file - promoters50/3433703
ataattttagaga

SEQ ID NO: 182629 - DNA, 13 bp, Unknown
  misc_feature (1)..( 13): Result.005 file - promoters50/3433703
aaaattttaaaat

SEQ ID NO: 182630 - DNA, 13 bp, Unknown
  misc_feature (1)..( 13): Result.005 file - promoters50/3433703
ataattttagaga

SEQ ID NO: 182631 - DNA, 13 bp, Unknown
  misc_feature (1)..( 13): Result.005 file - promoters50/3433703
aaaattacaaaaa

SEQ ID NO: 182632 - DNA, 14 bp, Unknown
  misc_feature (1)..( 14): Result.005 file - promoters50/3433703
aagaaaaaacaatg

SEQ ID NO: 182633 - DNA, 14 bp, Unknown
  misc_feature (1)..( 14): Result.005 file - promoters50/3433703
ctcataaatcaatc

SEQ ID NO: 182634 - DNA, 14 bp, Unknown
  misc_feature (1)..( 14): Result.005 file - promoters50/3433703
aagctaaaacattt

SEQ ID NO: 182635 - DNA, 14 bp, Unknown
  misc_feature (1)..( 14): Result.005 file - promoters50/3433703
agagctaaacaaca

SEQ ID NO: 182636 - DNA, 15 bp, Unknown
  misc_feature (1)..( 15): Result.005 file - promoters50/3433703
aaagtaaacacaata

SEQ ID NO: 182637 - DNA, 15 bp, Unknown
  misc_feature (1)..( 15): Result.005 file - promoters50/3433703
taatgacaatcaaat

SEQ ID NO: 182638 - DNA, 12 bp, Unknown
  misc_feature (1)..( 12): Result.005 file - promoters50/3433703
catataaatctc

SEQ ID NO: 182639 - DNA, 12 bp, Unknown
  misc_feature (1)..( 12): Result.005 file - promoters50/3433703
tctataaaaaaa

SEQ ID NO: 182640 - DNA, 12 bp, Unknown
  misc_feature (1)..( 12): Result.005 file - promoters50/3433703
tatataaatagt

SEQ ID NO: 182641 - DNA, 12 bp, Unknown
  misc_feature (1)..( 12): Result.005 file - promoters50/3433703
tatatatatctc

SEQ ID NO: 182642 - DNA, 12 bp, Unknown
  misc_feature (1)..( 12): Result.005 file - promoters50/3433703
gctataaaagga

SEQ ID NO: 182643 - DNA, 12 bp, Unknown
  misc_feature (1)..( 12): Result.005 file - promoters50/3433703
gttataaaacca

SEQ ID NO: 182644 - DNA, 12 bp, Unknown
  misc_feature (1)..( 12): Result.005 file - promoters50/3433703
tatttatatgtt

SEQ ID NO: 182645 - DNA, 10 bp, Unknown
  misc_feature (1)..( 10): Result.005 file - promoters50/3433703
acttgttata

SEQ ID NO: 182646 - DNA, 10 bp, Unknown
  misc_feature (1)..( 10): Result.005 file - promoters50/3433703
ttttgctata

SEQ ID NO: 182647 - DNA, 10 bp, Unknown
  misc_feature (1)..( 10): Result.005 file - promoters50/3433703
atttactaat

SEQ ID NO: 182648 - DNA, 10 bp, Unknown
  misc_feature (1)..( 10): Result.005 file - promoters50/3433703
aattattaaa

SEQ ID NO: 182649 - DNA, 10 bp, Unknown
  misc_feature (1)..( 10): Result.005 file - promoters50/3433703
tcttattaaa

SEQ ID NO: 182650 - DNA, 10 bp, Unknown
  misc_feature (1)..( 10): Result.005 file - promoters50/3433703
atttacgaga

SEQ ID NO: 182651 - DNA, 10 bp, Unknown
  misc_feature (1)..( 10): Result.005 file - promoters50/3433703
aaattattac

SEQ ID NO: 182652 - DNA, 10 bp, Unknown
  misc_feature (1)..( 10): Result.005 file - promoters50/3433703
aaatgatttc

SEQ ID NO: 182653 - DNA, 10 bp, Unknown
  misc_feature (1)..( 10): Result.005 file - promoters50/3433703
acattattga

SEQ ID NO: 182654 - DNA, 10 bp, Unknown
  misc_feature (1)..( 10): Result.005 file - promoters50/3433703
caatcatttt

SEQ ID NO: 182655 - DNA, 10 bp, Unknown
  misc_feature (1)..( 10): Result.005 file - promoters50/3433703
ataagattca

SEQ ID NO: 182656 - DNA, 10 bp, Unknown
  misc_feature (1)..( 10): Result.005 file - promoters50/3433703
cttgaattct

SEQ ID NO: 182657 - DNA, 10 bp, Unknown
  misc_feature (1)..( 10): Result.005 file - promoters50/3433703
acggaattcc

SEQ ID NO: 182658 - DNA, 10 bp, Unknown
  misc_feature (1)..( 10): Result.005 file - promoters50/3433703
aaatttatta

SEQ ID NO: 182659 - DNA, 10 bp, Unknown
  misc_feature (1)..( 10): Result.005 file - promoters50/3433703
acttttgtta

SEQ ID NO: 182660 - DNA, 10 bp, Unknown
  misc_feature (1)..( 10): Result.005 file - promoters50/3433703
aaatatatct

SEQ ID NO: 182661 - DNA, 10 bp, Unknown
  misc_feature (1)..( 10): Result.005 file - promoters50/3433703
tactttatta

SEQ ID NO: 182662 - DNA, 10 bp, Unknown
  misc_feature (1)..( 10): Result.005 file - promoters50/3433703
gtatttcttt

SEQ ID NO: 182663 - DNA, 10 bp, Unknown
  misc_feature (1)..( 10): Result.005 file - promoters50/3433703
aaaaataatt

SEQ ID NO: 182664 - DNA, 14 bp, Unknown
  misc_feature (1)..( 14): Result.005 file - promoters50/3433703
caaagaatttctcc

SEQ ID NO: 182665 - DNA, 14 bp, Unknown
  misc_feature (1)..( 14): Result.005 file - promoters50/3433703
aaaataattgataa

SEQ ID NO: 182666 - DNA, 14 bp, Unknown
  misc_feature (1)..( 14): Result.005 file - promoters50/3433703
tacggaattcctcc

SEQ ID NO: 182667 - DNA, 14 bp, Unknown
  misc_feature (1)..( 14): Result.005 file - promoters50/3433703
caaacaatcatttt

SEQ ID NO: 182668 - DNA, 14 bp, Unknown
  misc_feature (1)..( 14): Result.005 file - promoters50/3433703
taaatatatcttga

SEQ ID NO: 182669 - DNA, 14 bp, Unknown
  misc_feature (1)..( 14): Result.005 file - promoters50/3433703
tcttgaattctcat

SEQ ID NO: 182670 - DNA, 10 bp, Unknown
  misc_feature (1)..( 10): Result.005 file - promoters50/3433743
ttgagatttt

SEQ ID NO: 182671 - DNA, 10 bp, Unknown
  misc_feature (1)..( 10): Result.005 file - promoters50/3433743
ctaggatttt

SEQ ID NO: 182672 - DNA, 10 bp, Unknown
  misc_feature (1)..( 10): Result.005 file - promoters50/3433743
ttgaaatttc

SEQ ID NO: 182673 - DNA, 8 bp, Unknown
  misc_feature (1)..( 8): Result.005 file - promoters50/3433743
aaatttca

SEQ ID NO: 182674 - DNA, 8 bp, Unknown
  misc_feature (1)..( 8): Result.005 file - promoters50/3433743
aaatttcg

SEQ ID NO: 182675 - DNA, 8 bp, Unknown
  misc_feature (1)..( 8): Result.005 file - promoters50/3433743
tgatttcg

SEQ ID NO: 182676 - DNA, 12 bp, Unknown
  misc_feature (1)..( 12): Result.005 file - promoters50/3433799
gattgataacag

SEQ ID NO: 182677 - DNA, 12 bp, Unknown
  misc_feature (1)..( 12): Result.005 file - promoters50/3433799
gattgttaacag

SEQ ID NO: 182678 - DNA, 12 bp, Unknown
  misc_feature (1)..( 12): Result.005 file - promoters50/3433799
tattaataatcg

SEQ ID NO: 182679 - DNA, 7 bp, Unknown
  misc_feature (1)..( 7): Result.005 file - promoters50/3433799
tggcaaa

SEQ ID NO: 182680 - DNA, 7 bp, Unknown
  misc_feature (1)..( 7): Result.005 file - promoters50/3433799
tggaaaa

SEQ ID NO: 182681 - DNA, 7 bp, Unknown
  misc_feature (1)..( 7): Result.005 file - promoters50/3433799
tggaaac

SEQ ID NO: 182682 - DNA, 9 bp, Unknown
  misc_feature (1)..( 9): Result.005 file - promoters50/3433799
aaatcattg

SEQ ID NO: 182683 - DNA, 9 bp, Unknown
  misc_feature (1)..( 9): Result.005 file - promoters50/3433799
aaaccattt

SEQ ID NO: 182684 - DNA, 9 bp, Unknown
  misc_feature (1)..( 9): Result.005 file - promoters50/3433799
tatccattt

SEQ ID NO: 182685 - DNA, 9 bp, Unknown
  misc_feature (1)..( 9): Result.005 file - promoters50/3433799
ctttataat

SEQ ID NO: 182686 - DNA, 9 bp, Unknown
  misc_feature (1)..( 9): Result.005 file - promoters50/3433799
cattaaaat

SEQ ID NO: 182687 - DNA, 10 bp, Unknown
  misc_feature (1)..( 10): Result.005 file - promoters50/3433799
acttcataga

SEQ ID NO: 182688 - DNA, 7 bp, Unknown
  misc_feature (1)..( 7): Result.005 file - promoters50/3433854
gataaag

SEQ ID NO: 182689 - DNA, 7 bp, Unknown
  misc_feature (1)..( 7): Result.005 file - promoters50/3433854
gataaac

SEQ ID NO: 182690 - DNA, 7 bp, Unknown
  misc_feature (1)..( 7): Result.005 file - promoters50/3433854
cataaac

SEQ ID NO: 182691 - DNA, 8 bp, Unknown
  misc_feature (1)..( 8): Result.005 file - promoters50/3433854
tgacaaaa

SEQ ID NO: 182692 - DNA, 8 bp, Unknown
  misc_feature (1)..( 8): Result.005 file - promoters50/3433854
tgacgaaa

SEQ ID NO: 182693 - DNA, 8 bp, Unknown
  misc_feature (1)..( 8): Result.005 file - promoters50/3433854
tgacaatg

SEQ ID NO: 182694 - DNA, 7 bp, Unknown
  misc_feature (1)..( 7): Result.005 file - promoters50/3433854
attttat

SEQ ID NO: 182695 - DNA, 7 bp, Unknown
  misc_feature (1)..( 7): Result.005 file - promoters50/3433854
attttaa

SEQ ID NO: 182696 - DNA, 7 bp, Unknown
  misc_feature (1)..( 7): Result.005 file - promoters50/3433854
attttat

SEQ ID NO: 182697 - DNA, 10 bp, Unknown
  misc_feature (1)..( 10): Result.005 file - promoters50/3433904
catataaatg

SEQ ID NO: 182698 - DNA, 10 bp, Unknown
  misc_feature (1)..( 10): Result.005 file - promoters50/3433904
tttatgaatc

SEQ ID NO: 182699 - DNA, 10 bp, Unknown
  misc_feature (1)..( 10): Result.005 file - promoters50/3433904
tttataaaac

SEQ ID NO: 182700 - DNA, 10 bp, Unknown
  misc_feature (1)..( 10): Result.005 file - promoters50/3433904
actataaatt

SEQ ID NO: 182701 - DNA, 10 bp, Unknown
  misc_feature (1)..( 10): Result.005 file - promoters50/3433904
agggtaaatt

SEQ ID NO: 182702 - DNA, 10 bp, Unknown
  misc_feature (1)..( 10): Result.005 file - promoters50/3433904
agggtaaata

SEQ ID NO: 182703 - DNA, 9 bp, Unknown
  misc_feature (1)..( 9): Result.005 file - promoters50/3433926
gaagaaaca

SEQ ID NO: 182704 - DNA, 9 bp, Unknown
  misc_feature (1)..( 9): Result.005 file - promoters50/3433926
caagagaca

SEQ ID NO: 182705 - DNA, 9 bp, Unknown
  misc_feature (1)..( 9): Result.005 file - promoters50/3433926
gaacaaaac

SEQ ID NO: 182706 - DNA, 9 bp, Unknown
  misc_feature (1)..( 9): Result.005 file - promoters50/3433926
gaaaaaaag

SEQ ID NO: 182707 - DNA, 9 bp, Unknown
  misc_feature (1)..( 9): Result.005 file - promoters50/3433926
aaacaaatc

SEQ ID NO: 182708 - DNA, 9 bp, Unknown
  misc_feature (1)..( 9): Result.005 file - promoters50/3433926
aaataaata

SEQ ID NO: 182709 - DNA, 10 bp, Unknown
  misc_feature (1)..( 10): Result.005 file - promoters50/3433933
atgtttcttg

SEQ ID NO: 182710 - DNA, 10 bp, Unknown
  misc_feature (1)..( 10): Result.005 file - promoters50/3433933
atgttgcttg

SEQ ID NO: 182711 - DNA, 10 bp, Unknown
  misc_feature (1)..( 10): Result.005 file - promoters50/3433933
atgtttggtc

SEQ ID NO: 182712 - DNA, 11 bp, Unknown
  misc_feature (1)..( 11): Result.005 file - promoters50/3433944
aaatatgaatc

SEQ ID NO: 182713 - DNA, 11 bp, Unknown
  misc_feature (1)..( 11): Result.005 file - promoters50/3433944
tattatcaatg

SEQ ID NO: 182714 - DNA, 11 bp, Unknown
  misc_feature (1)..( 11): Result.005 file - promoters50/3433944
aaaaatgatga

SEQ ID NO: 182715 - DNA, 11 bp, Unknown
  misc_feature (1)..( 11): Result.005 file - promoters50/3433944
aaatctgaaaa

SEQ ID NO: 182716 - DNA, 11 bp, Unknown
  misc_feature (1)..( 11): Result.005 file - promoters50/3433944
caatttgaatg

SEQ ID NO: 182717 - DNA, 11 bp, Unknown
  misc_feature (1)..( 11): Result.005 file - promoters50/3433944
aaaattcaatg

SEQ ID NO: 182718 - DNA, 11 bp, Unknown
  misc_feature (1)..( 11): Result.005 file - promoters50/3433944
gaatatcaaag

SEQ ID NO: 182719 - DNA, 11 bp, Unknown
  misc_feature (1)..( 11): Result.005 file - promoters50/3433944
aacgatattaa

SEQ ID NO: 182720 - DNA, 11 bp, Unknown
  misc_feature (1)..( 11): Result.005 file - promoters50/3433944
tgtaataataa

SEQ ID NO: 182721 - DNA, 11 bp, Unknown
  misc_feature (1)..( 11): Result.005 file - promoters50/3433944
acagatattac

SEQ ID NO: 182722 - DNA, 11 bp, Unknown
  misc_feature (1)..( 11): Result.005 file - promoters50/3433944
tacgaaattgt

SEQ ID NO: 182723 - DNA, 11 bp, Unknown
  misc_feature (1)..( 11): Result.005 file - promoters50/3433944
taagacatttt

SEQ ID NO: 182724 - DNA, 11 bp, Unknown
  misc_feature (1)..( 11): Result.005 file - promoters50/3433944
taaaaaagtgt

SEQ ID NO: 182725 - DNA, 11 bp, Unknown
  misc_feature (1)..( 11): Result.005 file - promoters50/3433944
taccaaactga

SEQ ID NO: 182726 - DNA, 11 bp, Unknown
  misc_feature (1)..( 11): Result.005 file - promoters50/3433944
cgaaaaaaaag

SEQ ID NO: 182727 - DNA, 11 bp, Unknown
  misc_feature (1)..( 11): Result.005 file - promoters50/3433944
agaaagaaaat

SEQ ID NO: 182728 - DNA, 11 bp, Unknown
  misc_feature (1)..( 11): Result.005 file - promoters50/3433944
acaaaaaagat

SEQ ID NO: 182729 - DNA, 11 bp, Unknown
  misc_feature (1)..( 11): Result.005 file - promoters50/3433944
tcaaaaatact

SEQ ID NO: 182730 - DNA, 11 bp, Unknown
  misc_feature (1)..( 11): Result.005 file - promoters50/3433944
tcaaaagtgat

SEQ ID NO: 182731 - DNA, 11 bp, Unknown
  misc_feature (1)..( 11): Result.005 file - promoters50/3433944
tgaacgaagag

SEQ ID NO: 182732 - DNA, 11 bp, Unknown
  misc_feature (1)..( 11): Result.005 file - promoters50/3433944
agcaagagaga

SEQ ID NO: 182733 - DNA, 12 bp, Unknown
  misc_feature (1)..( 12): Result.005 file - promoters50/3433944
ataaaagtttta

SEQ ID NO: 182734 - DNA, 12 bp, Unknown
  misc_feature (1)..( 12): Result.005 file - promoters50/3433944
ttcaaatttttc

SEQ ID NO: 182735 - DNA, 12 bp, Unknown
  misc_feature (1)..( 12): Result.005 file - promoters50/3433944
tcaaaatttcac

SEQ ID NO: 182736 - DNA, 12 bp, Unknown
  misc_feature (1)..( 12): Result.005 file - promoters50/3433944
aaaaaagtacat

SEQ ID NO: 182737 - DNA, 12 bp, Unknown
  misc_feature (1)..( 12): Result.005 file - promoters50/3433944
ttcatattactt

SEQ ID NO: 182738 - DNA, 12 bp, Unknown
  misc_feature (1)..( 12): Result.005 file - promoters50/3433944
ctaaaaatacat

SEQ ID NO: 182739 - DNA, 9 bp, Unknown
  misc_feature (1)..( 9): Result.005 file - promoters50/3433958
agaaacact

SEQ ID NO: 182740 - DNA, 9 bp, Unknown
  misc_feature (1)..( 9): Result.005 file - promoters50/3433958
agaaacact

SEQ ID NO: 182741 - DNA, 9 bp, Unknown
  misc_feature (1)..( 9): Result.005 file - promoters50/3433958
taaaaaact

SEQ ID NO: 182742 - DNA, 9 bp, Unknown
  misc_feature (1)..( 9): Result.005 file - promoters50/3433978
ctaacttac

SEQ ID NO: 182743 - DNA, 9 bp, Unknown
  misc_feature (1)..( 9): Result.005 file - promoters50/3433978
agaacttaa

SEQ ID NO: 182744 - DNA, 9 bp, Unknown
  misc_feature (1)..( 9): Result.005 file - promoters50/3433978
gtaatttat

SEQ ID NO: 182745 - DNA, 9 bp, Unknown
  misc_feature (1)..( 9): Result.005 file - promoters50/3433978
taaacatac

SEQ ID NO: 182746 - DNA, 9 bp, Unknown
  misc_feature (1)..( 9): Result.005 file - promoters50/3433978
agaaattaa

SEQ ID NO: 182747 - DNA, 9 bp, Unknown
  misc_feature (1)..( 9): Result.005 file - promoters50/3433978
tgaaaaaaa

SEQ ID NO: 182748 - DNA, 9 bp, Unknown
  misc_feature (1)..( 9): Result.005 file - promoters50/3433978
ttgattaaa

SEQ ID NO: 182749 - DNA, 15 bp, Unknown
  misc_feature (1)..( 15): Result.005 file - promoters50/3433978
ttcacaaactttcat

SEQ ID NO: 182750 - DNA, 15 bp, Unknown
  misc_feature (1)..( 15): Result.005 file - promoters50/3433978
gacataaatttttta

SEQ ID NO: 182751 - DNA, 15 bp, Unknown
  misc_feature (1)..( 15): Result.005 file - promoters50/3433978
atagttaactttgaa

SEQ ID NO: 182752 - DNA, 15 bp, Unknown
  misc_feature (1)..( 15): Result.005 file - promoters50/3433978
gacagaaactttttt

SEQ ID NO: 182753 - DNA, 15 bp, Unknown
  misc_feature (1)..( 15): Result.005 file - promoters50/3433978
ttatttaacttacat

SEQ ID NO: 182754 - DNA, 15 bp, Unknown
  misc_feature (1)..( 15): Result.005 file - promoters50/3433978
gacatcaattttgct

SEQ ID NO: 182755 - DNA, 9 bp, Unknown
  misc_feature (1)..( 9): Result.005 file - promoters50/3433978
aaaatttgt

SEQ ID NO: 182756 - DNA, 9 bp, Unknown
  misc_feature (1)..( 9): Result.005 file - promoters50/3433978
caaattttt

SEQ ID NO: 182757 - DNA, 10 bp, Unknown
  misc_feature (1)..( 10): Result.005 file - promoters50/3433978
tttattatta

SEQ ID NO: 182758 - DNA, 10 bp, Unknown
  misc_feature (1)..( 10): Result.005 file - promoters50/3433978
tagcttatta

SEQ ID NO: 182759 - DNA, 10 bp, Unknown
  misc_feature (1)..( 10): Result.005 file - promoters50/3433978
tgtatcattc

SEQ ID NO: 182760 - DNA, 10 bp, Unknown
  misc_feature (1)..( 10): Result.005 file - promoters50/3433978
ccaattttta

SEQ ID NO: 182761 - DNA, 10 bp, Unknown
  misc_feature (1)..( 10): Result.005 file - promoters50/3433978
taaataaagt

SEQ ID NO: 182762 - DNA, 10 bp, Unknown
  misc_feature (1)..( 10): Result.005 file - promoters50/3433978
ccaatagagt

SEQ ID NO: 182763 - DNA, 10 bp, Unknown
  misc_feature (1)..( 10): Result.005 file - promoters50/3433978
aaaataaaaa

SEQ ID NO: 182764 - DNA, 10 bp, Unknown
  misc_feature (1)..( 10): Result.005 file - promoters50/3433978
taaataatta

SEQ ID NO: 182765 - DNA, 11 bp, Unknown
  misc_feature (1)..( 11): Result.005 file - promoters50/3433978
ccaatgaaacc

SEQ ID NO: 182766 - DNA, 11 bp, Unknown
  misc_feature (1)..( 11): Result.005 file - promoters50/3433978
aacataaaacg

SEQ ID NO: 182767 - DNA, 8 bp, Unknown
  misc_feature (1)..( 8): Result.005 file - promoters50/3433989
gagatgag

SEQ ID NO: 182768 - DNA, 8 bp, Unknown
  misc_feature (1)..( 8): Result.005 file - promoters50/3433989
aagacgag

SEQ ID NO: 182769 - DNA, 8 bp, Unknown
  misc_feature (1)..( 8): Result.005 file - promoters50/3433989
gagatggt

SEQ ID NO: 182770 - DNA, 9 bp, Unknown
  misc_feature (1)..( 9): Result.005 file - promoters50/3433989
gtggagatg

SEQ ID NO: 182771 - DNA, 9 bp, Unknown
  misc_feature (1)..( 9): Result.005 file - promoters50/3433989
gtgaagatc

SEQ ID NO: 182772 - DNA, 9 bp, Unknown
  misc_feature (1)..( 9): Result.005 file - promoters50/3433989
tcagagatg

SEQ ID NO: 182773 - DNA, 9 bp, Unknown
  misc_feature (1)..( 9): Result.005 file - promoters50/3433989
ttgaagagt

SEQ ID NO: 182774 - DNA, 9 bp, Unknown
  misc_feature (1)..( 9): Result.005 file - promoters50/3433989
tcgagattg

SEQ ID NO: 182775 - DNA, 9 bp, Unknown
  misc_feature (1)..( 9): Result.005 file - promoters50/3433989
acgagtttg

SEQ ID NO: 182776 - DNA, 9 bp, Unknown
  misc_feature (1)..( 9): Result.005 file - promoters50/3433989
acgagtgaa

SEQ ID NO: 182777 - DNA, 15 bp, Unknown
  misc_feature (1)..( 15): Result.005 file - promoters50/3433998
tccatctctctctct

SEQ ID NO: 182778 - DNA, 15 bp, Unknown
  misc_feature (1)..( 15): Result.005 file - promoters50/3433998
tacatatcttgattc

SEQ ID NO: 182779 - DNA, 15 bp, Unknown
  misc_feature (1)..( 15): Result.005 file - promoters50/3433998
aacatatctatggct

SEQ ID NO: 182780 - DNA, 15 bp, Unknown
  misc_feature (1)..( 15): Result.005 file - promoters50/3433998
tacacatccaatcaa

SEQ ID NO: 182781 - DNA, 15 bp, Unknown
  misc_feature (1)..( 15): Result.005 file - promoters50/3433998
cgattataaacacta

SEQ ID NO: 182782 - DNA, 15 bp, Unknown
  misc_feature (1)..( 15): Result.005 file - promoters50/3433998
ttcaaataaaccatt

SEQ ID NO: 182783 - DNA, 15 bp, Unknown
  misc_feature (1)..( 15): Result.005 file - promoters50/3433998
accttatcaaaaaaa

SEQ ID NO: 182784 - DNA, 14 bp, Unknown
  misc_feature (1)..( 14): Result.005 file - promoters50/3433998
atcgaaacaaaaaa

SEQ ID NO: 182785 - DNA, 14 bp, Unknown
  misc_feature (1)..( 14): Result.005 file - promoters50/3433998
atccaaacatgcct

SEQ ID NO: 182786 - DNA, 14 bp, Unknown
  misc_feature (1)..( 14): Result.005 file - promoters50/3433998
ttataaataaaaga

SEQ ID NO: 182787 - DNA, 14 bp, Unknown
  misc_feature (1)..( 14): Result.005 file - promoters50/3433998
aaaaaaagaaaaaa

SEQ ID NO: 182788 - DNA, 14 bp, Unknown
  misc_feature (1)..( 14): Result.005 file - promoters50/3433998
ctgatcataaaaag

SEQ ID NO: 182789 - DNA, 14 bp, Unknown
  misc_feature (1)..( 14): Result.005 file - promoters50/3433998
cgttgaagaaaaag

SEQ ID NO: 182790 - DNA, 12 bp, Unknown
  misc_feature (1)..( 12): Result.005 file - promoters50/3433998
agagaaaaaaac

SEQ ID NO: 182791 - DNA, 12 bp, Unknown
  misc_feature (1)..( 12): Result.005 file - promoters50/3433998
ttttaaaaaaaa

SEQ ID NO: 182792 - DNA, 12 bp, Unknown
  misc_feature (1)..( 12): Result.005 file - promoters50/3433998
atgaagaaaaat

SEQ ID NO: 182793 - DNA, 12 bp, Unknown
  misc_feature (1)..( 12): Result.005 file - promoters50/3433998
tagtaaaaaaat

SEQ ID NO: 182794 - DNA, 12 bp, Unknown
  misc_feature (1)..( 12): Result.005 file - promoters50/3433998
gattataaacac

SEQ ID NO: 182795 - DNA, 12 bp, Unknown
  misc_feature (1)..( 12): Result.005 file - promoters50/3433998
gattctaatttc

SEQ ID NO: 182796 - DNA, 12 bp, Unknown
  misc_feature (1)..( 12): Result.005 file - promoters50/3433998
aattatatacac

SEQ ID NO: 182797 - DNA, 14 bp, Unknown
  misc_feature (1)..( 14): Result.005 file - promoters50/3433998
aaacaaaaaataat

SEQ ID NO: 182798 - DNA, 14 bp, Unknown
  misc_feature (1)..( 14): Result.005 file - promoters50/3433998
aagaaaaaaaaatc

SEQ ID NO: 182799 - DNA, 14 bp, Unknown
  misc_feature (1)..( 14): Result.005 file - promoters50/3433998
aaagaaaaaacttt

SEQ ID NO: 182800 - DNA, 14 bp, Unknown
  misc_feature (1)..( 14): Result.005 file - promoters50/3433998
taataaaaacatgt

SEQ ID NO: 182801 - DNA, 14 bp, Unknown
  misc_feature (1)..( 14): Result.005 file - promoters50/3433998
tcataaaaagtctt

SEQ ID NO: 182802 - DNA, 14 bp, Unknown
  misc_feature (1)..( 14): Result.005 file - promoters50/3433998
tagtaaaaaaatct

SEQ ID NO: 182803 - DNA, 11 bp, Unknown
  misc_feature (1)..( 11): Result.005 file - promoters50/3433998
atgtttaaaat

SEQ ID NO: 182804 - DNA, 11 bp, Unknown
  misc_feature (1)..( 11): Result.005 file - promoters50/3433998
gattttaaaaa

SEQ ID NO: 182805 - DNA, 11 bp, Unknown
  misc_feature (1)..( 11): Result.005 file - promoters50/3433998
gcttttaaaga

SEQ ID NO: 182806 - DNA, 11 bp, Unknown
  misc_feature (1)..( 11): Result.005 file - promoters50/3433998
caaattaaaat

SEQ ID NO: 182807 - DNA, 11 bp, Unknown
  misc_feature (1)..( 11): Result.005 file - promoters50/3433998
gattctaattt

SEQ ID NO: 182808 - DNA, 12 bp, Unknown
  misc_feature (1)..( 12): Result.005 file - promoters50/3433998
atttttataaat

SEQ ID NO: 182809 - DNA, 12 bp, Unknown
  misc_feature (1)..( 12): Result.005 file - promoters50/3433998
ttcattcaaata

SEQ ID NO: 182810 - DNA, 12 bp, Unknown
  misc_feature (1)..( 12): Result.005 file - promoters50/3433998
ttcttatctcaa

SEQ ID NO: 182811 - DNA, 12 bp, Unknown
  misc_feature (1)..( 12): Result.005 file - promoters50/3433998
tgcttctctatg

SEQ ID NO: 182812 - DNA, 12 bp, Unknown
  misc_feature (1)..( 12): Result.005 file - promoters50/3433998
atcttatgattc

SEQ ID NO: 182813 - DNA, 12 bp, Unknown
  misc_feature (1)..( 12): Result.005 file - promoters50/3433998
aagttccctaac

SEQ ID NO: 182814 - DNA, 12 bp, Unknown
  misc_feature (1)..( 12): Result.005 file - promoters50/3433998
agcttaggattc

SEQ ID NO: 182815 - DNA, 12 bp, Unknown
  misc_feature (1)..( 12): Result.005 file - promoters50/3433998
atcttaatttca

SEQ ID NO: 182816 - DNA, 11 bp, Unknown
  misc_feature (1)..( 11): Result.005 file - promoters50/3433998
gattccaatct

SEQ ID NO: 182817 - DNA, 11 bp, Unknown
  misc_feature (1)..( 11): Result.005 file - promoters50/3433998
gattctaattt

SEQ ID NO: 182818 - DNA, 11 bp, Unknown
  misc_feature (1)..( 11): Result.005 file - promoters50/3433998
acatccaatca

SEQ ID NO: 182819 - DNA, 11 bp, Unknown
  misc_feature (1)..( 11): Result.005 file - promoters50/3433998
cattcaaataa

SEQ ID NO: 182820 - DNA, 11 bp, Unknown
  misc_feature (1)..( 11): Result.005 file - promoters50/3433998
gattttaaaaa

SEQ ID NO: 182821 - DNA, 11 bp, Unknown
  misc_feature (1)..( 11): Result.005 file - promoters50/3433998
atttttataaa

SEQ ID NO: 182822 - DNA, 11 bp, Unknown
  misc_feature (1)..( 11): Result.005 file - promoters50/3433998
gattataaaca

SEQ ID NO: 182823 - DNA, 10 bp, Unknown
  misc_feature (1)..( 10): Result.005 file - promoters50/3434028
gtaaatcatt

SEQ ID NO: 182824 - DNA, 10 bp, Unknown
  misc_feature (1)..( 10): Result.005 file - promoters50/3434028
tgaaatcaaa

SEQ ID NO: 182825 - DNA, 10 bp, Unknown
  misc_feature (1)..( 10): Result.005 file - promoters50/3434028
gtaattcaaa

SEQ ID NO: 182826 - DNA, 10 bp, Unknown
  misc_feature (1)..( 10): Result.005 file - promoters50/3434028
ttaaatcttg

SEQ ID NO: 182827 - DNA, 10 bp, Unknown
  misc_feature (1)..( 10): Result.005 file - promoters50/3434028
aaaaatccaa

SEQ ID NO: 182828 - DNA, 10 bp, Unknown
  misc_feature (1)..( 10): Result.005 file - promoters50/3434028
ttaaattaga

SEQ ID NO: 182829 - DNA, 10 bp, Unknown
  misc_feature (1)..( 10): Result.005 file - promoters50/3434028
acaaatctat

SEQ ID NO: 182830 - DNA, 11 bp, Unknown
  misc_feature (1)..( 11): Result.005 file - promoters50/3434028
acttttgtagt

SEQ ID NO: 182831 - DNA, 11 bp, Unknown
  misc_feature (1)..( 11): Result.005 file - promoters50/3434028
aattttgtttt

SEQ ID NO: 182832 - DNA, 11 bp, Unknown
  misc_feature (1)..( 11): Result.005 file - promoters50/3434028
tattttgtaaa

SEQ ID NO: 182833 - DNA, 11 bp, Unknown
  misc_feature (1)..( 11): Result.005 file - promoters50/3434028
aattatgttat

SEQ ID NO: 182834 - DNA, 11 bp, Unknown
  misc_feature (1)..( 11): Result.005 file - promoters50/3434028
cctttagtttt

SEQ ID NO: 182835 - DNA, 11 bp, Unknown
  misc_feature (1)..( 11): Result.005 file - promoters50/3434028
tatctagttta

SEQ ID NO: 182836 - DNA, 9 bp, Unknown
  misc_feature (1)..( 9): Result.005 file - promoters50/3434028
tgtaaatca

SEQ ID NO: 182837 - DNA, 9 bp, Unknown
  misc_feature (1)..( 9): Result.005 file - promoters50/3434028
tgtaaatta

SEQ ID NO: 182838 - DNA, 9 bp, Unknown
  misc_feature (1)..( 9): Result.005 file - promoters50/3434028
cttaaatct

SEQ ID NO: 182839 - DNA, 9 bp, Unknown
  misc_feature (1)..( 9): Result.005 file - promoters50/3434028
gctaaatta

SEQ ID NO: 182840 - DNA, 9 bp, Unknown
  misc_feature (1)..( 9): Result.005 file - promoters50/3434028
tttaaatta

SEQ ID NO: 182841 - DNA, 9 bp, Unknown
  misc_feature (1)..( 9): Result.005 file - promoters50/3434028
tacaaatct

SEQ ID NO: 182842 - DNA, 9 bp, Unknown
  misc_feature (1)..( 9): Result.005 file - promoters50/3434028
atttgaaat

SEQ ID NO: 182843 - DNA, 9 bp, Unknown
  misc_feature (1)..( 9): Result.005 file - promoters50/3434028
atttgatca

SEQ ID NO: 182844 - DNA, 9 bp, Unknown
  misc_feature (1)..( 9): Result.005 file - promoters50/3434028
ttttcaaaa

SEQ ID NO: 182845 - DNA, 9 bp, Unknown
  misc_feature (1)..( 9): Result.005 file - promoters50/3434028
gtttgttca

SEQ ID NO: 182846 - DNA, 9 bp, Unknown
  misc_feature (1)..( 9): Result.005 file - promoters50/3434028
aattcaaat

SEQ ID NO: 182847 - DNA, 9 bp, Unknown
  misc_feature (1)..( 9): Result.005 file - promoters50/3434028
ttttcaatt

SEQ ID NO: 182848 - DNA, 14 bp, Unknown
  misc_feature (1)..( 14): Result.005 file - promoters50/3434044
gaaaaaaaaacttg

SEQ ID NO: 182849 - DNA, 14 bp, Unknown
  misc_feature (1)..( 14): Result.005 file - promoters50/3434044
gaagaaaaaaattg

SEQ ID NO: 182850 - DNA, 14 bp, Unknown
  misc_feature (1)..( 14): Result.005 file - promoters50/3434044
aaaaaaaaaatcat

SEQ ID NO: 182851 - DNA, 15 bp, Unknown
  misc_feature (1)..( 15): Result.005 file - promoters50/3434044
tttaaccaaaacttc

SEQ ID NO: 182852 - DNA, 14 bp, Unknown
  misc_feature (1)..( 14): Result.005 file - promoters50/3434044
aaaacaaaaagaag

SEQ ID NO: 182853 - DNA, 15 bp, Unknown
  misc_feature (1)..( 15): Result.005 file - promoters50/3434044
aaagaaataaatatt

SEQ ID NO: 182854 - DNA, 15 bp, Unknown
  misc_feature (1)..( 15): Result.005 file - promoters50/3434044
gaaaaaaaaagtttg

SEQ ID NO: 182855 - DNA, 14 bp, Unknown
  misc_feature (1)..( 14): Result.005 file - promoters50/3434044
ataagcccaataga

SEQ ID NO: 182856 - DNA, 14 bp, Unknown
  misc_feature (1)..( 14): Result.005 file - promoters50/3434044
tatttgccaagaga

SEQ ID NO: 182857 - DNA, 14 bp, Unknown
  misc_feature (1)..( 14): Result.005 file - promoters50/3434044
ctcagcccattaga

SEQ ID NO: 182858 - DNA, 14 bp, Unknown
  misc_feature (1)..( 14): Result.005 file - promoters50/3434044
ttaggcccgttaaa

SEQ ID NO: 182859 - DNA, 14 bp, Unknown
  misc_feature (1)..( 14): Result.005 file - promoters50/3434044
taaagcccaaaaat

SEQ ID NO: 182860 - DNA, 14 bp, Unknown
  misc_feature (1)..( 14): Result.005 file - promoters50/3434044
taaaaccctaatat

SEQ ID NO: 182861 - DNA, 10 bp, Unknown
  misc_feature (1)..( 10): Result.005 file - promoters50/3434105
tttttgaaaa

SEQ ID NO: 182862 - DNA, 10 bp, Unknown
  misc_feature (1)..( 10): Result.005 file - promoters50/3434105
gtttcgaaat

SEQ ID NO: 182863 - DNA, 10 bp, Unknown
  misc_feature (1)..( 10): Result.005 file - promoters50/3434105
gtttcgaaga

SEQ ID NO: 182864 - DNA, 10 bp, Unknown
  misc_feature (1)..( 10): Result.005 file - promoters50/3434105
ttttttaaaa

SEQ ID NO: 182865 - DNA, 11 bp, Unknown
  misc_feature (1)..( 11): Result.005 file - promoters50/3434105
gatatgacaat

SEQ ID NO: 182866 - DNA, 11 bp, Unknown
  misc_feature (1)..( 11): Result.005 file - promoters50/3434105
tttttgaattt

SEQ ID NO: 182867 - DNA, 11 bp, Unknown
  misc_feature (1)..( 11): Result.005 file - promoters50/3434105
atttcttatat

SEQ ID NO: 182868 - DNA, 14 bp, Unknown
  misc_feature (1)..( 14): Result.005 file - promoters50/3434105
ctcaatttttaccc

SEQ ID NO: 182869 - DNA, 14 bp, Unknown
  misc_feature (1)..( 14): Result.005 file - promoters50/3434105
gtcagttttcatgt

SEQ ID NO: 182870 - DNA, 14 bp, Unknown
  misc_feature (1)..( 14): Result.005 file - promoters50/3434105
tcttgttttcttaa

SEQ ID NO: 182871 - DNA, 14 bp, Unknown
  misc_feature (1)..( 14): Result.005 file - promoters50/3434105
cgttgttttgtgta

SEQ ID NO: 182872 - DNA, 14 bp, Unknown
  misc_feature (1)..( 14): Result.005 file - promoters50/3434105
acaaattttattaa

SEQ ID NO: 182873 - DNA, 14 bp, Unknown
  misc_feature (1)..( 14): Result.005 file - promoters50/3434105
tttaattgatcgct

SEQ ID NO: 182874 - DNA, 10 bp, Unknown
  misc_feature (1)..( 10): Result.005 file - promoters50/3434105
atgtatattt

SEQ ID NO: 182875 - DNA, 10 bp, Unknown
  misc_feature (1)..( 10): Result.005 file - promoters50/3434105
tgttatattg

SEQ ID NO: 182876 - DNA, 10 bp, Unknown
  misc_feature (1)..( 10): Result.005 file - promoters50/3434105
aagtaaattt

SEQ ID NO: 182877 - DNA, 10 bp, Unknown
  misc_feature (1)..( 10): Result.005 file - promoters50/3434105
ctttatatat

SEQ ID NO: 182878 - DNA, 10 bp, Unknown
  misc_feature (1)..( 10): Result.005 file - promoters50/3434105
aagaaaaatc

SEQ ID NO: 182879 - DNA, 10 bp, Unknown
  misc_feature (1)..( 10): Result.005 file - promoters50/3434105
tcttatatat

SEQ ID NO: 182880 - DNA, 10 bp, Unknown
  misc_feature (1)..( 10): Result.005 file - promoters50/3434105
ctatatatga

SEQ ID NO: 182881 - DNA, 10 bp, Unknown
  misc_feature (1)..( 10): Result.005 file - promoters50/3434105
ctatatatac

SEQ ID NO: 182882 - DNA, 10 bp, Unknown
  misc_feature (1)..( 10): Result.005 file - promoters50/3434105
atatataaag

SEQ ID NO: 182883 - DNA, 10 bp, Unknown
  misc_feature (1)..( 10): Result.005 file - promoters50/3434105
ctatataaag

SEQ ID NO: 182884 - DNA, 10 bp, Unknown
  misc_feature (1)..( 10): Result.005 file - promoters50/3434105
ctatataagc

SEQ ID NO: 182885 - DNA, 10 bp, Unknown
  misc_feature (1)..( 10): Result.005 file - promoters50/3434105
ctatatataa

SEQ ID NO: 182886 - DNA, 10 bp, Unknown
  misc_feature (1)..( 10): Result.005 file - promoters50/3434105
taataaaagg

SEQ ID NO: 182887 - DNA, 10 bp, Unknown
  misc_feature (1)..( 10): Result.005 file - promoters50/3434105
ctttccttag

SEQ ID NO: 182888 - DNA, 10 bp, Unknown
  misc_feature (1)..( 10): Result.005 file - promoters50/3434105
cgttccttaa

SEQ ID NO: 182889 - DNA, 10 bp, Unknown
  misc_feature (1)..( 10): Result.005 file - promoters50/3434105
gttttcttaa

SEQ ID NO: 182890 - DNA, 10 bp, Unknown
  misc_feature (1)..( 10): Result.005 file - promoters50/3434105
gttttcatgt

SEQ ID NO: 182891 - DNA, 10 bp, Unknown
  misc_feature (1)..( 10): Result.005 file - promoters50/3434105
attttattaa

SEQ ID NO: 182892 - DNA, 10 bp, Unknown
  misc_feature (1)..( 10): Result.005 file - promoters50/3434105
gtttaattga

SEQ ID NO: 182893 - DNA, 12 bp, Unknown
  misc_feature (1)..( 12): Result.005 file - promoters50/3434108
gttattttggat

SEQ ID NO: 182894 - DNA, 12 bp, Unknown
  misc_feature (1)..( 12): Result.005 file - promoters50/3434108
ccaattttgccg

SEQ ID NO: 182895 - DNA, 12 bp, Unknown
  misc_feature (1)..( 12): Result.005 file - promoters50/3434108
tttactttggaa

SEQ ID NO: 182896 - DNA, 12 bp, Unknown
  misc_feature (1)..( 12): Result.005 file - promoters50/3434108
tgaatattgaac

SEQ ID NO: 182897 - DNA, 12 bp, Unknown
  misc_feature (1)..( 12): Result.005 file - promoters50/3434108
taatgtttgctt

SEQ ID NO: 182898 - DNA, 12 bp, Unknown
  misc_feature (1)..( 12): Result.005 file - promoters50/3434108
tttactttaaaa

SEQ ID NO: 182899 - DNA, 14 bp, Unknown
  misc_feature (1)..( 14): Result.005 file - promoters50/3434108
tttggatgaattta

SEQ ID NO: 182900 - DNA, 14 bp, Unknown
  misc_feature (1)..( 14): Result.005 file - promoters50/3434108
ccttgattaatttc

SEQ ID NO: 182901 - DNA, 14 bp, Unknown
  misc_feature (1)..( 14): Result.005 file - promoters50/3434108
tttggattaatgtc

SEQ ID NO: 182902 - DNA, 14 bp, Unknown
  misc_feature (1)..( 14): Result.005 file - promoters50/3434108
tcgatttcaattta

SEQ ID NO: 182903 - DNA, 14 bp, Unknown
  misc_feature (1)..( 14): Result.005 file - promoters50/3434108
atgctcataattta

SEQ ID NO: 182904 - DNA, 14 bp, Unknown
  misc_feature (1)..( 14): Result.005 file - promoters50/3434108
tctgtaataattta

SEQ ID NO: 182905 - DNA, 20 bp, Unknown
  misc_feature (1)..( 20): Result.005 file - promoters50/3434108
atttaaattttttgttgtta

SEQ ID NO: 182906 - DNA, 20 bp, Unknown
  misc_feature (1)..( 20): Result.005 file - promoters50/3434108
aaataaattgaatgtgtttt

SEQ ID NO: 182907 - DNA, 20 bp, Unknown
  misc_feature (1)..( 20): Result.005 file - promoters50/3434108
acttaaatttacgctcactt

SEQ ID NO: 182908 - DNA, 20 bp, Unknown
  misc_feature (1)..( 20): Result.005 file - promoters50/3434108
aaaaaaattgtaatcctttt

SEQ ID NO: 182909 - DNA, 20 bp, Unknown
  misc_feature (1)..( 20): Result.005 file - promoters50/3434108
tcccaaattgaatcgaattt

SEQ ID NO: 182910 - DNA, 20 bp, Unknown
  misc_feature (1)..( 20): Result.005 file - promoters50/3434108
actttaattgaaccgacttt

SEQ ID NO: 182911 - DNA, 12 bp, Unknown
  misc_feature (1)..( 12): Result.005 file - promoters50/3434108
tcaaaataaaaa

SEQ ID NO: 182912 - DNA, 12 bp, Unknown
  misc_feature (1)..( 12): Result.005 file - promoters50/3434108
acaacatacaaa

SEQ ID NO: 182913 - DNA, 12 bp, Unknown
  misc_feature (1)..( 12): Result.005 file - promoters50/3434108
atcaaataattc

SEQ ID NO: 182914 - DNA, 12 bp, Unknown
  misc_feature (1)..( 12): Result.005 file - promoters50/3434108
tcaaaaatttgt

SEQ ID NO: 182915 - DNA, 12 bp, Unknown
  misc_feature (1)..( 12): Result.005 file - promoters50/3434108
acaaaacaattc

SEQ ID NO: 182916 - DNA, 12 bp, Unknown
  misc_feature (1)..( 12): Result.005 file - promoters50/3434108
ccaaaagaatca

SEQ ID NO: 182917 - DNA, 14 bp, Unknown
  misc_feature (1)..( 14): Result.005 file - promoters50/3434108
ttaaaaaatcaaaa

SEQ ID NO: 182918 - DNA, 14 bp, Unknown
  misc_feature (1)..( 14): Result.005 file - promoters50/3434108
atttgaaatcaaat

SEQ ID NO: 182919 - DNA, 14 bp, Unknown
  misc_feature (1)..( 14): Result.005 file - promoters50/3434108
ttaacaaaacaatt

SEQ ID NO: 182920 - DNA, 14 bp, Unknown
  misc_feature (1)..( 14): Result.005 file - promoters50/3434108
ttaatgtttcaaaa

SEQ ID NO: 182921 - DNA, 14 bp, Unknown
  misc_feature (1)..( 14): Result.005 file - promoters50/3434108
tgtggttatcaaat

SEQ ID NO: 182922 - DNA, 14 bp, Unknown
  misc_feature (1)..( 14): Result.005 file - promoters50/3434108
caaaagaatcagtg

SEQ ID NO: 182923 - DNA, 9 bp, Unknown
  misc_feature (1)..( 9): Result.005 file - promoters50/3434108
tgaatttat

SEQ ID NO: 182924 - DNA, 9 bp, Unknown
  misc_feature (1)..( 9): Result.005 file - promoters50/3434108
aagatttat

SEQ ID NO: 182925 - DNA, 9 bp, Unknown
  misc_feature (1)..( 9): Result.005 file - promoters50/3434108
tcaatttaa

SEQ ID NO: 182926 - DNA, 9 bp, Unknown
  misc_feature (1)..( 9): Result.005 file - promoters50/3434108
ccaattttg

SEQ ID NO: 182927 - DNA, 9 bp, Unknown
  misc_feature (1)..( 9): Result.005 file - promoters50/3434108
ataatttag

SEQ ID NO: 182928 - DNA, 9 bp, Unknown
  misc_feature (1)..( 9): Result.005 file - promoters50/3434108
ataatttac

SEQ ID NO: 182929 - DNA, 10 bp, Unknown
  misc_feature (1)..( 10): Result.005 file - promoters50/3434108
aatttatttt

SEQ ID NO: 182930 - DNA, 10 bp, Unknown
  misc_feature (1)..( 10): Result.005 file - promoters50/3434108
aatttagtct

SEQ ID NO: 182931 - DNA, 10 bp, Unknown
  misc_feature (1)..( 10): Result.005 file - promoters50/3434108
aatttacttt

SEQ ID NO: 182932 - DNA, 10 bp, Unknown
  misc_feature (1)..( 10): Result.005 file - promoters50/3434108
aatttaatca

SEQ ID NO: 182933 - DNA, 10 bp, Unknown
  misc_feature (1)..( 10): Result.005 file - promoters50/3434108
tgtttgcttc

SEQ ID NO: 182934 - DNA, 10 bp, Unknown
  misc_feature (1)..( 10): Result.005 file - promoters50/3434108
tttttacttt

SEQ ID NO: 182935 - DNA, 10 bp, Unknown
  misc_feature (1)..( 10): Result.005 file - promoters50/3434120
caaaaaccaa

SEQ ID NO: 182936 - DNA, 10 bp, Unknown
  misc_feature (1)..( 10): Result.005 file - promoters50/3434120
gaaaaacttt

SEQ ID NO: 182937 - DNA, 10 bp, Unknown
  misc_feature (1)..( 10): Result.005 file - promoters50/3434120
taaaatcttt

SEQ ID NO: 182938 - DNA, 10 bp, Unknown
  misc_feature (1)..( 10): Result.005 file - promoters50/3434120
taaaatatct

SEQ ID NO: 182939 - DNA, 10 bp, Unknown
  misc_feature (1)..( 10): Result.005 file - promoters50/3434120
caaaatcaca

SEQ ID NO: 182940 - DNA, 10 bp, Unknown
  misc_feature (1)..( 10): Result.005 file - promoters50/3434145
aaatttaatt

SEQ ID NO: 182941 - DNA, 10 bp, Unknown
  misc_feature (1)..( 10): Result.005 file - promoters50/3434145
aaagttaatt

SEQ ID NO: 182942 - DNA, 10 bp, Unknown
  misc_feature (1)..( 10): Result.005 file - promoters50/3434145
caatctaact

SEQ ID NO: 182943 - DNA, 10 bp, Unknown
  misc_feature (1)..( 10): Result.005 file - promoters50/3434145
gaatataatt

SEQ ID NO: 182944 - DNA, 10 bp, Unknown
  misc_feature (1)..( 10): Result.005 file - promoters50/3434145
gaatctaata

SEQ ID NO: 182945 - DNA, 12 bp, Unknown
  misc_feature (1)..( 12): Result.005 file - promoters50/3434145
tttttatttatt

SEQ ID NO: 182946 - DNA, 12 bp, Unknown
  misc_feature (1)..( 12): Result.005 file - promoters50/3434145
aacttatttaaa

SEQ ID NO: 182947 - DNA, 12 bp, Unknown
  misc_feature (1)..( 12): Result.005 file - promoters50/3434145
actttatttttg

SEQ ID NO: 182948 - DNA, 12 bp, Unknown
  misc_feature (1)..( 12): Result.005 file - promoters50/3434145
taagaattaaaa

SEQ ID NO: 182949 - DNA, 12 bp, Unknown
  misc_feature (1)..( 12): Result.005 file - promoters50/3434145
aacatattcttg

SEQ ID NO: 182950 - DNA, 7 bp, Unknown
  misc_feature (1)..( 7): Result.005 file - promoters50/3434147
attatgt

SEQ ID NO: 182951 - DNA, 7 bp, Unknown
  misc_feature (1)..( 7): Result.005 file - promoters50/3434147
tttatgt

SEQ ID NO: 182952 - DNA, 7 bp, Unknown
  misc_feature (1)..( 7): Result.005 file - promoters50/3434147
attatgt

SEQ ID NO: 182953 - DNA, 11 bp, Unknown
  misc_feature (1)..( 11): Result.005 file - promoters50/3434147
acattaatatt

SEQ ID NO: 182954 - DNA, 11 bp, Unknown
  misc_feature (1)..( 11): Result.005 file - promoters50/3434147
aaattaaaatt

SEQ ID NO: 182955 - DNA, 11 bp, Unknown
  misc_feature (1)..( 11): Result.005 file - promoters50/3434147
acattaaaatc

SEQ ID NO: 182956 - DNA, 9 bp, Unknown
  misc_feature (1)..( 9): Result.005 file - promoters50/3434147
ttccataaa

SEQ ID NO: 182957 - DNA, 9 bp, Unknown
  misc_feature (1)..( 9): Result.005 file - promoters50/3434147
ttcaatatt

SEQ ID NO: 182958 - DNA, 9 bp, Unknown
  misc_feature (1)..( 9): Result.005 file - promoters50/3434147
caccaaaaa

SEQ ID NO: 182959 - DNA, 8 bp, Unknown
  misc_feature (1)..( 8): Result.005 file - promoters50/3434147
attttaca

SEQ ID NO: 182960 - DNA, 8 bp, Unknown
  misc_feature (1)..( 8): Result.005 file - promoters50/3434147
atttcaca

SEQ ID NO: 182961 - DNA, 8 bp, Unknown
  misc_feature (1)..( 8): Result.005 file - promoters50/3434147
atttcaca

SEQ ID NO: 182962 - DNA, 9 bp, Unknown
  misc_feature (1)..( 9): Result.005 file - promoters50/3434147
cccaatgtc

SEQ ID NO: 182963 - DNA, 9 bp, Unknown
  misc_feature (1)..( 9): Result.005 file - promoters50/3434147
cccaataga

SEQ ID NO: 182964 - DNA, 9 bp, Unknown
  misc_feature (1)..( 9): Result.005 file - promoters50/3434147
accaaagtc

SEQ ID NO: 182965 - DNA, 7 bp, Unknown
  misc_feature (1)..( 7): Result.005 file - promoters50/3434231
tgtgtgt

SEQ ID NO: 182966 - DNA, 7 bp, Unknown
  misc_feature (1)..( 7): Result.005 file - promoters50/3434231
tgtctgt

SEQ ID NO: 182967 - DNA, 7 bp, Unknown
  misc_feature (1)..( 7): Result.005 file - promoters50/3434231
tctatgc

SEQ ID NO: 182968 - DNA, 12 bp, Unknown
  misc_feature (1)..( 12): Result.005 file - promoters50/3434233
taagctcaaagc

SEQ ID NO: 182969 - DNA, 12 bp, Unknown
  misc_feature (1)..( 12): Result.005 file - promoters50/3434233
aaagcccaacac

SEQ ID NO: 182970 - DNA, 12 bp, Unknown
  misc_feature (1)..( 12): Result.005 file - promoters50/3434233
ccttctcagagc

SEQ ID NO: 182971 - DNA, 12 bp, Unknown
  misc_feature (1)..( 12): Result.005 file - promoters50/3434233
aaagccattatt

SEQ ID NO: 182972 - DNA, 12 bp, Unknown
  misc_feature (1)..( 12): Result.005 file - promoters50/3434233
atagttcacagc

SEQ ID NO: 182973 - DNA, 12 bp, Unknown
  misc_feature (1)..( 12): Result.005 file - promoters50/3434233
taagccacataa

SEQ ID NO: 182974 - DNA, 16 bp, Unknown
  misc_feature (1)..( 16): Result.005 file - promoters50/3434233
tattgaaaaagaaaaa

SEQ ID NO: 182975 - DNA, 16 bp, Unknown
  misc_feature (1)..( 16): Result.005 file - promoters50/3434233
aaaagaaaaagaaaaa

SEQ ID NO: 182976 - DNA, 16 bp, Unknown
  misc_feature (1)..( 16): Result.005 file - promoters50/3434233
gagggaaagagatgaa

SEQ ID NO: 182977 - DNA, 16 bp, Unknown
  misc_feature (1)..( 16): Result.005 file - promoters50/3434233
tatttaaaacgttgac

SEQ ID NO: 182978 - DNA, 16 bp, Unknown
  misc_feature (1)..( 16): Result.005 file - promoters50/3434233
tactaaaatagatgga

SEQ ID NO: 182979 - DNA, 16 bp, Unknown
  misc_feature (1)..( 16): Result.005 file - promoters50/3434233
agcaaaaacagaataa

SEQ ID NO: 182980 - DNA, 10 bp, Unknown
  misc_feature (1)..( 10): Result.005 file - promoters50/3434233
ctcaaagccc

SEQ ID NO: 182981 - DNA, 10 bp, Unknown
  misc_feature (1)..( 10): Result.005 file - promoters50/3434233
ttcacagcaa

SEQ ID NO: 182982 - DNA, 10 bp, Unknown
  misc_feature (1)..( 10): Result.005 file - promoters50/3434233
agaaaagcca

SEQ ID NO: 182983 - DNA, 10 bp, Unknown
  misc_feature (1)..( 10): Result.005 file - promoters50/3434233
ctcagagcga

SEQ ID NO: 182984 - DNA, 10 bp, Unknown
  misc_feature (1)..( 10): Result.005 file - promoters50/3434233
ctcaaagccc

SEQ ID NO: 182985 - DNA, 10 bp, Unknown
  misc_feature (1)..( 10): Result.005 file - promoters50/3434233
caataagcca

SEQ ID NO: 182986 - DNA, 11 bp, Unknown
  misc_feature (1)..( 11): Result.005 file - promoters50/3434233
gaattgatatt

SEQ ID NO: 182987 - DNA, 11 bp, Unknown
  misc_feature (1)..( 11): Result.005 file - promoters50/3434233
aaatagatgga

SEQ ID NO: 182988 - DNA, 11 bp, Unknown
  misc_feature (1)..( 11): Result.005 file - promoters50/3434233
tgtttgagatt

SEQ ID NO: 182989 - DNA, 11 bp, Unknown
  misc_feature (1)..( 11): Result.005 file - promoters50/3434233
aaaaagaaaaa

SEQ ID NO: 182990 - DNA, 11 bp, Unknown
  misc_feature (1)..( 11): Result.005 file - promoters50/3434233
aaaaagattgt

SEQ ID NO: 182991 - DNA, 11 bp, Unknown
  misc_feature (1)..( 11): Result.005 file - promoters50/3434233
gtaaagatttt

SEQ ID NO: 182992 - DNA, 14 bp, Unknown
  misc_feature (1)..( 14): Result.005 file - promoters50/3434256
ttaatttatttatt

SEQ ID NO: 182993 - DNA, 14 bp, Unknown
  misc_feature (1)..( 14): Result.005 file - promoters50/3434256
aagatttgtttttt

SEQ ID NO: 182994 - DNA, 14 bp, Unknown
  misc_feature (1)..( 14): Result.005 file - promoters50/3434256
ttaatttattccta

SEQ ID NO: 182995 - DNA, 14 bp, Unknown
  misc_feature (1)..( 14): Result.005 file - promoters50/3434256
tttatttctttaaa

SEQ ID NO: 182996 - DNA, 14 bp, Unknown
  misc_feature (1)..( 14): Result.005 file - promoters50/3434256
gagaattatgccta

SEQ ID NO: 182997 - DNA, 14 bp, Unknown
  misc_feature (1)..( 14): Result.005 file - promoters50/3434256
ttaaattaacaaaa

SEQ ID NO: 182998 - DNA, 12 bp, Unknown
  misc_feature (1)..( 12): Result.005 file - promoters50/3434256
attaaaaaaaaa

SEQ ID NO: 182999 - DNA, 12 bp, Unknown
  misc_feature (1)..( 12): Result.005 file - promoters50/3434256
gttaataaattt

SEQ ID NO: 183000 - DNA, 12 bp, Unknown
  misc_feature (1)..( 12): Result.005 file - promoters50/3434256
attaaattaaca

SEQ ID NO: 183001 - DNA, 12 bp, Unknown
  misc_feature (1)..( 12): Result.005 file - promoters50/3434256
gttgataataaa

SEQ ID NO: 183002 - DNA, 12 bp, Unknown
  misc_feature (1)..( 12): Result.005 file - promoters50/3434256
tttaataaacca

SEQ ID NO: 183003 - DNA, 12 bp, Unknown
  misc_feature (1)..( 12): Result.005 file - promoters50/3434256
attaaaaaaact

SEQ ID NO: 183004 - DNA, 13 bp, Unknown
  misc_feature (1)..( 13): Result.005 file - promoters50/3434256
aattcctttcttc

SEQ ID NO: 183005 - DNA, 13 bp, Unknown
  misc_feature (1)..( 13): Result.005 file - promoters50/3434256
atttcatttccaa

SEQ ID NO: 183006 - DNA, 13 bp, Unknown
  misc_feature (1)..( 13): Result.005 file - promoters50/3434256
tcttctttttttc

SEQ ID NO: 183007 - DNA, 13 bp, Unknown
  misc_feature (1)..( 13): Result.005 file - promoters50/3434256
attttattttatt

SEQ ID NO: 183008 - DNA, 13 bp, Unknown
  misc_feature (1)..( 13): Result.005 file - promoters50/3434256
attacatacctaa

SEQ ID NO: 183009 - DNA, 13 bp, Unknown
  misc_feature (1)..( 13): Result.005 file - promoters50/3434256
gatttatcctaag

SEQ ID NO: 183010 - DNA, 17 bp, Unknown
  misc_feature (1)..( 17): Result.005 file - promoters50/3434256
tagatatagttctttaa

SEQ ID NO: 183011 - DNA, 17 bp, Unknown
  misc_feature (1)..( 17): Result.005 file - promoters50/3434256
agataatatttcatttc

SEQ ID NO: 183012 - DNA, 17 bp, Unknown
  misc_feature (1)..( 17): Result.005 file - promoters50/3434256
attaagtactttttaga

SEQ ID NO: 183013 - DNA, 17 bp, Unknown
  misc_feature (1)..( 17): Result.005 file - promoters50/3434256
atagagttttttctata

SEQ ID NO: 183014 - DNA, 17 bp, Unknown
  misc_feature (1)..( 17): Result.005 file - promoters50/3434256
ttaaattacatacctaa

SEQ ID NO: 183015 - DNA, 17 bp, Unknown
  misc_feature (1)..( 17): Result.005 file - promoters50/3434256
cttctggactttataga

SEQ ID NO: 183016 - DNA, 11 bp, Unknown
  misc_feature (1)..( 11): Result.005 file - promoters50/3434256
tctttaactag

SEQ ID NO: 183017 - DNA, 11 bp, Unknown
  misc_feature (1)..( 11): Result.005 file - promoters50/3434256
attttaattag

SEQ ID NO: 183018 - DNA, 11 bp, Unknown
  misc_feature (1)..( 11): Result.005 file - promoters50/3434256
tctttaatgtc

SEQ ID NO: 183019 - DNA, 11 bp, Unknown
  misc_feature (1)..( 11): Result.005 file - promoters50/3434256
aagttacctag

SEQ ID NO: 183020 - DNA, 11 bp, Unknown
  misc_feature (1)..( 11): Result.005 file - promoters50/3434256
tatttcatttc

SEQ ID NO: 183021 - DNA, 11 bp, Unknown
  misc_feature (1)..( 11): Result.005 file - promoters50/3434256
aaattacatac

SEQ ID NO: 183022 - DNA, 14 bp, Unknown
  misc_feature (1)..( 14): Result.005 file - promoters50/3434279
tgagacctaagttt

SEQ ID NO: 183023 - DNA, 14 bp, Unknown
  misc_feature (1)..( 14): Result.005 file - promoters50/3434279
aatgacataaattt

SEQ ID NO: 183024 - DNA, 14 bp, Unknown
  misc_feature (1)..( 14): Result.005 file - promoters50/3434279
tccttctgaagttt

SEQ ID NO: 183025 - DNA, 14 bp, Unknown
  misc_feature (1)..( 14): Result.005 file - promoters50/3434279
aataacatatgact

SEQ ID NO: 183026 - DNA, 14 bp, Unknown
  misc_feature (1)..( 14): Result.005 file - promoters50/3434279
actaatatatattc

SEQ ID NO: 183027 - DNA, 14 bp, Unknown
  misc_feature (1)..( 14): Result.005 file - promoters50/3434279
tgtgatatattgtt

SEQ ID NO: 183028 - DNA, 14 bp, Unknown
  misc_feature (1)..( 14): Result.005 file - promoters50/3434279
aataatctaataaa

SEQ ID NO: 183029 - DNA, 12 bp, Unknown
  misc_feature (1)..( 12): Result.005 file - promoters50/3434279
ccaaacaaaaca

SEQ ID NO: 183030 - DNA, 12 bp, Unknown
  misc_feature (1)..( 12): Result.005 file - promoters50/3434279
agaaacaaagta

SEQ ID NO: 183031 - DNA, 12 bp, Unknown
  misc_feature (1)..( 12): Result.005 file - promoters50/3434279
gtcgacaaaatg

SEQ ID NO: 183032 - DNA, 12 bp, Unknown
  misc_feature (1)..( 12): Result.005 file - promoters50/3434279
ccaaacaacatt

SEQ ID NO: 183033 - DNA, 12 bp, Unknown
  misc_feature (1)..( 12): Result.005 file - promoters50/3434279
taaaaccaagac

SEQ ID NO: 183034 - DNA, 12 bp, Unknown
  misc_feature (1)..( 12): Result.005 file - promoters50/3434279
agacaccaagac

SEQ ID NO: 183035 - DNA, 15 bp, Unknown
  misc_feature (1)..( 15): Result.005 file - promoters50/3434303
ttttcatgtgtttgg

SEQ ID NO: 183036 - DNA, 15 bp, Unknown
  misc_feature (1)..( 15): Result.005 file - promoters50/3434303
gtggcatttgttttt

SEQ ID NO: 183037 - DNA, 15 bp, Unknown
  misc_feature (1)..( 15): Result.005 file - promoters50/3434303
tgaatctttattttt

SEQ ID NO: 183038 - DNA, 15 bp, Unknown
  misc_feature (1)..( 15): Result.005 file - promoters50/3434303
aataaatgtttcttt

SEQ ID NO: 183039 - DNA, 11 bp, Unknown
  misc_feature (1)..( 11): Result.005 file - promoters50/3434303
cagagagaacg

SEQ ID NO: 183040 - DNA, 11 bp, Unknown
  misc_feature (1)..( 11): Result.005 file - promoters50/3434303
tgaagataacg

SEQ ID NO: 183041 - DNA, 11 bp, Unknown
  misc_feature (1)..( 11): Result.005 file - promoters50/3434303
ggaagatatcc

SEQ ID NO: 183042 - DNA, 11 bp, Unknown
  misc_feature (1)..( 11): Result.005 file - promoters50/3434303
ggaagaaggaa

SEQ ID NO: 183043 - DNA, 14 bp, Unknown
  misc_feature (1)..( 14): Result.005 file - promoters50/3434303
tgaaggaagaagaa

SEQ ID NO: 183044 - DNA, 14 bp, Unknown
  misc_feature (1)..( 14): Result.005 file - promoters50/3434303
tgaacgaaaataat

SEQ ID NO: 183045 - DNA, 14 bp, Unknown
  misc_feature (1)..( 14): Result.005 file - promoters50/3434303
aaaacgaatataat

SEQ ID NO: 183046 - DNA, 14 bp, Unknown
  misc_feature (1)..( 14): Result.005 file - promoters50/3434303
tgtacgaatttgcg

SEQ ID NO: 183047 - DNA, 10 bp, Unknown
  misc_feature (1)..( 10): Result.005 file - promoters50/3434303
aaaaacaaac

SEQ ID NO: 183048 - DNA, 10 bp, Unknown
  misc_feature (1)..( 10): Result.005 file - promoters50/3434303
aaaaataaaa

SEQ ID NO: 183049 - DNA, 10 bp, Unknown
  misc_feature (1)..( 10): Result.005 file - promoters50/3434303
ataaagaaaa

SEQ ID NO: 183050 - DNA, 10 bp, Unknown
  misc_feature (1)..( 10): Result.005 file - promoters50/3434303
taaactaaaa

SEQ ID NO: 183051 - DNA, 8 bp, Unknown
  misc_feature (1)..( 8): Result.005 file - promoters50/3434328
tgtttttt

SEQ ID NO: 183052 - DNA, 8 bp, Unknown
  misc_feature (1)..( 8): Result.005 file - promoters50/3434328
tgtttttt

SEQ ID NO: 183053 - DNA, 8 bp, Unknown
  misc_feature (1)..( 8): Result.005 file - promoters50/3434328
cctttttt

SEQ ID NO: 183054 - DNA, 9 bp, Unknown
  misc_feature (1)..( 9): Result.005 file - promoters50/3434350
tatgacaat

SEQ ID NO: 183055 - DNA, 9 bp, Unknown
  misc_feature (1)..( 9): Result.005 file - promoters50/3434350
tataacaac

SEQ ID NO: 183056 - DNA, 9 bp, Unknown
  misc_feature (1)..( 9): Result.005 file - promoters50/3434350
tatgacaat

SEQ ID NO: 183057 - DNA, 9 bp, Unknown
  misc_feature (1)..( 9): Result.005 file - promoters50/3434350
gttgataat

SEQ ID NO: 183058 - DNA, 9 bp, Unknown
  misc_feature (1)..( 9): Result.005 file - promoters50/3434350
ctatatata

SEQ ID NO: 183059 - DNA, 9 bp, Unknown
  misc_feature (1)..( 9): Result.005 file - promoters50/3434350
atatatata

SEQ ID NO: 183060 - DNA, 9 bp, Unknown
  misc_feature (1)..( 9): Result.005 file - promoters50/3434350
ttatttatc

SEQ ID NO: 183061 - DNA, 9 bp, Unknown
  misc_feature (1)..( 9): Result.005 file - promoters50/3434350
ttaattatg

SEQ ID NO: 183062 - DNA, 8 bp, Unknown
  misc_feature (1)..( 8): Result.005 file - promoters50/3434350
tatataag

SEQ ID NO: 183063 - DNA, 8 bp, Unknown
  misc_feature (1)..( 8): Result.005 file - promoters50/3434350
aatataaa

SEQ ID NO: 183064 - DNA, 8 bp, Unknown
  misc_feature (1)..( 8): Result.005 file - promoters50/3434350
tttataag

SEQ ID NO: 183065 - DNA, 8 bp, Unknown
  misc_feature (1)..( 8): Result.005 file - promoters50/3434350
aatataat

SEQ ID NO: 183066 - DNA, 8 bp, Unknown
  misc_feature (1)..( 8): Result.005 file - promoters50/3434350
tttataac

SEQ ID NO: 183067 - DNA, 8 bp, Unknown
  misc_feature (1)..( 8): Result.005 file - promoters50/3434355
aatttttg

SEQ ID NO: 183068 - DNA, 8 bp, Unknown
  misc_feature (1)..( 8): Result.005 file - promoters50/3434355
aatttttt

SEQ ID NO: 183069 - DNA, 8 bp, Unknown
  misc_feature (1)..( 8): Result.005 file - promoters50/3434355
aatgtttg

SEQ ID NO: 183070 - DNA, 11 bp, Unknown
  misc_feature (1)..( 11): Result.005 file - promoters50/3434355
ttttttacatg

SEQ ID NO: 183071 - DNA, 11 bp, Unknown
  misc_feature (1)..( 11): Result.005 file - promoters50/3434355
atttttaaatg

SEQ ID NO: 183072 - DNA, 11 bp, Unknown
  misc_feature (1)..( 11): Result.005 file - promoters50/3434355
attgttaacga

SEQ ID NO: 183073 - DNA, 8 bp, Unknown
  misc_feature (1)..( 8): Result.005 file - promoters50/3434355
taaatttg

SEQ ID NO: 183074 - DNA, 8 bp, Unknown
  misc_feature (1)..( 8): Result.005 file - promoters50/3434355
taatttta

SEQ ID NO: 183075 - DNA, 8 bp, Unknown
  misc_feature (1)..( 8): Result.005 file - promoters50/3434355
aaaattgt

SEQ ID NO: 183076 - DNA, 15 bp, Unknown
  misc_feature (1)..( 15): Result.005 file - promoters50/3434355
cttttatttacttat

SEQ ID NO: 183077 - DNA, 15 bp, Unknown
  misc_feature (1)..( 15): Result.005 file - promoters50/3434355
gatttttttagttat

SEQ ID NO: 183078 - DNA, 15 bp, Unknown
  misc_feature (1)..( 15): Result.005 file - promoters50/3434355
cttttattatttcaa

SEQ ID NO: 183079 - DNA, 9 bp, Unknown
  misc_feature (1)..( 9): Result.005 file - promoters50/3434355
gagaaaaaa

SEQ ID NO: 183080 - DNA, 9 bp, Unknown
  misc_feature (1)..( 9): Result.005 file - promoters50/3434355
gagaaaaat

SEQ ID NO: 183081 - DNA, 10 bp, Unknown
  misc_feature (1)..( 10): Result.005 file - promoters50/3434355
aagaaacaaa

SEQ ID NO: 183082 - DNA, 9 bp, Unknown
  misc_feature (1)..( 9): Result.005 file - promoters50/3434355
tgtgttttg

SEQ ID NO: 183083 - DNA, 9 bp, Unknown
  misc_feature (1)..( 9): Result.005 file - promoters50/3434355
agagttttg

SEQ ID NO: 183084 - DNA, 9 bp, Unknown
  misc_feature (1)..( 9): Result.005 file - promoters50/3434355
agaattttt

SEQ ID NO: 183085 - DNA, 12 bp, Unknown
  misc_feature (1)..( 12): Result.005 file - promoters50/3434381
ttgaaatgaaaa

SEQ ID NO: 183086 - DNA, 12 bp, Unknown
  misc_feature (1)..( 12): Result.005 file - promoters50/3434381
tacaaatgagtg

SEQ ID NO: 183087 - DNA, 12 bp, Unknown
  misc_feature (1)..( 12): Result.005 file - promoters50/3434381
ttgaagtgaaaa

SEQ ID NO: 183088 - DNA, 12 bp, Unknown
  misc_feature (1)..( 12): Result.005 file - promoters50/3434381
cttgaatgaatt

SEQ ID NO: 183089 - DNA, 7 bp, Unknown
  misc_feature (1)..( 7): Result.005 file - promoters50/3434381
gatattg

SEQ ID NO: 183090 - DNA, 7 bp, Unknown
  misc_feature (1)..( 7): Result.005 file - promoters50/3434381
aatattg

SEQ ID NO: 183091 - DNA, 7 bp, Unknown
  misc_feature (1)..( 7): Result.005 file - promoters50/3434381
aatatta

SEQ ID NO: 183092 - DNA, 7 bp, Unknown
  misc_feature (1)..( 7): Result.005 file - promoters50/3434392
ttatatg

SEQ ID NO: 183093 - DNA, 7 bp, Unknown
  misc_feature (1)..( 7): Result.005 file - promoters50/3434392
ttatatt

SEQ ID NO: 183094 - DNA, 7 bp, Unknown
  misc_feature (1)..( 7): Result.005 file - promoters50/3434392
ttacatt

SEQ ID NO: 183095 - DNA, 9 bp, Unknown
  misc_feature (1)..( 9): Result.005 file - promoters50/3434400
gcatagaac

SEQ ID NO: 183096 - DNA, 11 bp, Unknown
  misc_feature (1)..( 11): Result.005 file - promoters50/3434400
ctgcaaagaaa

SEQ ID NO: 183097 - DNA, 11 bp, Unknown
  misc_feature (1)..( 11): Result.005 file - promoters50/3434400
ttagatagaat

SEQ ID NO: 183098 - DNA, 11 bp, Unknown
  misc_feature (1)..( 11): Result.005 file - promoters50/3434400
ttttgaagaaa

SEQ ID NO: 183099 - DNA, 11 bp, Unknown
  misc_feature (1)..( 11): Result.005 file - promoters50/3434400
ccagaaaaaaa

SEQ ID NO: 183100 - DNA, 11 bp, Unknown
  misc_feature (1)..( 11): Result.005 file - promoters50/3434400
tttcgaagaat

SEQ ID NO: 183101 - DNA, 12 bp, Unknown
  misc_feature (1)..( 12): Result.005 file - promoters50/3434400
aatgaacataca

SEQ ID NO: 183102 - DNA, 12 bp, Unknown
  misc_feature (1)..( 12): Result.005 file - promoters50/3434400
aatgaagatagt

SEQ ID NO: 183103 - DNA, 12 bp, Unknown
  misc_feature (1)..( 12): Result.005 file - promoters50/3434400
ggagaacattgt

SEQ ID NO: 183104 - DNA, 12 bp, Unknown
  misc_feature (1)..( 12): Result.005 file - promoters50/3434400
tgcaaagaaagt

SEQ ID NO: 183105 - DNA, 12 bp, Unknown
  misc_feature (1)..( 12): Result.005 file - promoters50/3434400
ccagaaaaaaaa

SEQ ID NO: 183106 - DNA, 12 bp, Unknown
  misc_feature (1)..( 12): Result.005 file - promoters50/3434400
aatgaataacgt

SEQ ID NO: 183107 - DNA, 10 bp, Unknown
  misc_feature (1)..( 10): Result.005 file - promoters50/3434400
ctttataatg

SEQ ID NO: 183108 - DNA, 10 bp, Unknown
  misc_feature (1)..( 10): Result.005 file - promoters50/3434400
cattaaaatc

SEQ ID NO: 183109 - DNA, 11 bp, Unknown
  misc_feature (1)..( 11): Result.005 file - promoters50/3434400
acttcatagag

SEQ ID NO: 183110 - DNA, 11 bp, Unknown
  misc_feature (1)..( 11): Result.005 file - promoters50/3434400
gttttttaatt

SEQ ID NO: 183111 - DNA, 11 bp, Unknown
  misc_feature (1)..( 11): Result.005 file - promoters50/3434400
gtattaaacaa

SEQ ID NO: 183112 - DNA, 11 bp, Unknown
  misc_feature (1)..( 11): Result.005 file - promoters50/3434400
atggtttaatt

SEQ ID NO: 183113 - DNA, 8 bp, Unknown
  misc_feature (1)..( 8): Result.005 file - promoters50/3434408
aaaggaag

SEQ ID NO: 183114 - DNA, 8 bp, Unknown
  misc_feature (1)..( 8): Result.005 file - promoters50/3434408
gaagtaag

SEQ ID NO: 183115 - DNA, 8 bp, Unknown
  misc_feature (1)..( 8): Result.005 file - promoters50/3434408
gaagtagc

SEQ ID NO: 183116 - DNA, 7 bp, Unknown
  misc_feature (1)..( 7): Result.005 file - promoters50/3434408
tcatttt

SEQ ID NO: 183117 - DNA, 7 bp, Unknown
  misc_feature (1)..( 7): Result.005 file - promoters50/3434408
tcaattt

SEQ ID NO: 183118 - DNA, 7 bp, Unknown
  misc_feature (1)..( 7): Result.005 file - promoters50/3434408
tcattta

SEQ ID NO: 183119 - DNA, 8 bp, Unknown
  misc_feature (1)..( 8): Result.005 file - promoters50/3434424
caaaagaa

SEQ ID NO: 183120 - DNA, 8 bp, Unknown
  misc_feature (1)..( 8): Result.005 file - promoters50/3434424
caaaagtt

SEQ ID NO: 183121 - DNA, 8 bp, Unknown
  misc_feature (1)..( 8): Result.005 file - promoters50/3434424
caaaagaa

SEQ ID NO: 183122 - DNA, 9 bp, Unknown
  misc_feature (1)..( 9): Result.005 file - promoters50/3434488
aagcaaaaa

SEQ ID NO: 183123 - DNA, 9 bp, Unknown
  misc_feature (1)..( 9): Result.005 file - promoters50/3434488
aagcaaaaa

SEQ ID NO: 183124 - DNA, 9 bp, Unknown
  misc_feature (1)..( 9): Result.005 file - promoters50/3434488
aagtaaaaa

SEQ ID NO: 183125 - DNA, 7 bp, Unknown
  misc_feature (1)..( 7): Result.005 file - promoters50/3434488
atttata

SEQ ID NO: 183126 - DNA, 7 bp, Unknown
  misc_feature (1)..( 7): Result.005 file - promoters50/3434488
ctttata

SEQ ID NO: 183127 - DNA, 7 bp, Unknown
  misc_feature (1)..( 7): Result.005 file - promoters50/3434488
ctttatt

SEQ ID NO: 183128 - DNA, 11 bp, Unknown
  misc_feature (1)..( 11): Result.005 file - promoters50/3434488
ttattgtaaac

SEQ ID NO: 183129 - DNA, 11 bp, Unknown
  misc_feature (1)..( 11): Result.005 file - promoters50/3434488
acattataaat

SEQ ID NO: 183130 - DNA, 11 bp, Unknown
  misc_feature (1)..( 11): Result.005 file - promoters50/3434488
ttattgtaaac

SEQ ID NO: 183131 - DNA, 7 bp, Unknown
  misc_feature (1)..( 7): Result.005 file - promoters50/3434488
atttttt

SEQ ID NO: 183132 - DNA, 7 bp, Unknown
  misc_feature (1)..( 7): Result.005 file - promoters50/3434488
atttttt

SEQ ID NO: 183133 - DNA, 7 bp, Unknown
  misc_feature (1)..( 7): Result.005 file - promoters50/3434488
atttttt

SEQ ID NO: 183134 - DNA, 8 bp, Unknown
  misc_feature (1)..( 8): Result.005 file - promoters50/3434488
ttttattt

SEQ ID NO: 183135 - DNA, 8 bp, Unknown
  misc_feature (1)..( 8): Result.005 file - promoters50/3434488
ctttattt

SEQ ID NO: 183136 - DNA, 8 bp, Unknown
  misc_feature (1)..( 8): Result.005 file - promoters50/3434488
ctttatag

SEQ ID NO: 183137 - DNA, 10 bp, Unknown
  misc_feature (1)..( 10): Result.005 file - promoters50/3434488
taaaatataa

SEQ ID NO: 183138 - DNA, 10 bp, Unknown
  misc_feature (1)..( 10): Result.005 file - promoters50/3434488
taaaaaataa

SEQ ID NO: 183139 - DNA, 11 bp, Unknown
  misc_feature (1)..( 11): Result.005 file - promoters50/3434488
atagaaattaa

SEQ ID NO: 183140 - DNA, 10 bp, Unknown
  misc_feature (1)..( 10): Result.005 file - promoters50/3434488
atatttagta

SEQ ID NO: 183141 - DNA, 10 bp, Unknown
  misc_feature (1)..( 10): Result.005 file - promoters50/3434488
atatttagtt

SEQ ID NO: 183142 - DNA, 10 bp, Unknown
  misc_feature (1)..( 10): Result.005 file - promoters50/3434488
taattttgtt

SEQ ID NO: 183143 - DNA, 12 bp, Unknown
  misc_feature (1)..( 12): Result.005 file - promoters50/3434563
acaataaataca

SEQ ID NO: 183144 - DNA, 12 bp, Unknown
  misc_feature (1)..( 12): Result.005 file - promoters50/3434563
gcaattaataat

SEQ ID NO: 183145 - DNA, 12 bp, Unknown
  misc_feature (1)..( 12): Result.005 file - promoters50/3434563
aaaataaactag

SEQ ID NO: 183146 - DNA, 12 bp, Unknown
  misc_feature (1)..( 12): Result.005 file - promoters50/3434563
gatgtaaaaatt

SEQ ID NO: 183147 - DNA, 12 bp, Unknown
  misc_feature (1)..( 12): Result.005 file - promoters50/3434563
aagctaagaatt

SEQ ID NO: 183148 - DNA, 12 bp, Unknown
  misc_feature (1)..( 12): Result.005 file - promoters50/3434563
gcaatttcacaa

SEQ ID NO: 183149 - DNA, 12 bp, Unknown
  misc_feature (1)..( 12): Result.005 file - promoters50/3434563
tctatgaaaagc

SEQ ID NO: 183150 - DNA, 14 bp, Unknown
  misc_feature (1)..( 14): Result.005 file - promoters50/3434563
aattttaatatttt

SEQ ID NO: 183151 - DNA, 14 bp, Unknown
  misc_feature (1)..( 14): Result.005 file - promoters50/3434563
caaacttttatttt

SEQ ID NO: 183152 - DNA, 14 bp, Unknown
  misc_feature (1)..( 14): Result.005 file - promoters50/3434563
tattattatatttg

SEQ ID NO: 183153 - DNA, 15 bp, Unknown
  misc_feature (1)..( 15): Result.005 file - promoters50/3434563
cttttaagtatcttt

SEQ ID NO: 183154 - DNA, 15 bp, Unknown
  misc_feature (1)..( 15): Result.005 file - promoters50/3434563
ttccaaaatatcttg

SEQ ID NO: 183155 - DNA, 15 bp, Unknown
  misc_feature (1)..( 15): Result.005 file - promoters50/3434563
caaatttttactttt

SEQ ID NO: 183156 - DNA, 9 bp, Unknown
  misc_feature (1)..( 9): Result.005 file - promoters50/3434648
cttgtcata

SEQ ID NO: 183157 - DNA, 9 bp, Unknown
  misc_feature (1)..( 9): Result.005 file - promoters50/3434648
cttgtctga

SEQ ID NO: 183158 - DNA, 9 bp, Unknown
  misc_feature (1)..( 9): Result.005 file - promoters50/3434648
attgttata

SEQ ID NO: 183159 - DNA, 8 bp, Unknown
  misc_feature (1)..( 8): Result.005 file - promoters50/3434648
tgtatcag

SEQ ID NO: 183160 - DNA, 8 bp, Unknown
  misc_feature (1)..( 8): Result.005 file - promoters50/3434648
tgtctcag

SEQ ID NO: 183161 - DNA, 8 bp, Unknown
  misc_feature (1)..( 8): Result.005 file - promoters50/3434648
tgtttcaa

SEQ ID NO: 183162 - DNA, 10 bp, Unknown
  misc_feature (1)..( 10): Result.005 file - promoters50/3434648
taataagttg

SEQ ID NO: 183163 - DNA, 10 bp, Unknown
  misc_feature (1)..( 10): Result.005 file - promoters50/3434648
atatatgttt

SEQ ID NO: 183164 - DNA, 10 bp, Unknown
  misc_feature (1)..( 10): Result.005 file - promoters50/3434648
atatatattt

SEQ ID NO: 183165 - DNA, 8 bp, Unknown
  misc_feature (1)..( 8): Result.005 file - promoters50/3434652
gataaaaa

SEQ ID NO: 183166 - DNA, 8 bp, Unknown
  misc_feature (1)..( 8): Result.005 file - promoters50/3434652
gatcaaaa

SEQ ID NO: 183167 - DNA, 8 bp, Unknown
  misc_feature (1)..( 8): Result.005 file - promoters50/3434652
gatcaaat

SEQ ID NO: 183168 - DNA, 11 bp, Unknown
  misc_feature (1)..( 11): Result.005 file - promoters50/3434652
attttttcagc

SEQ ID NO: 183169 - DNA, 11 bp, Unknown
  misc_feature (1)..( 11): Result.005 file - promoters50/3434652
attttttaagc

SEQ ID NO: 183170 - DNA, 11 bp, Unknown
  misc_feature (1)..( 11): Result.005 file - promoters50/3434652
ttttattctca

SEQ ID NO: 183171 - DNA, 9 bp, Unknown
  misc_feature (1)..( 9): Result.005 file - promoters50/3434652
taaagttgt

SEQ ID NO: 183172 - DNA, 9 bp, Unknown
  misc_feature (1)..( 9): Result.005 file - promoters50/3434652
taaggttgt

SEQ ID NO: 183173 - DNA, 9 bp, Unknown
  misc_feature (1)..( 9): Result.005 file - promoters50/3434652
aaaaattgt

SEQ ID NO: 183174 - DNA, 11 bp, Unknown
  misc_feature (1)..( 11): Result.005 file - promoters50/3434652
ataaatctaaa

SEQ ID NO: 183175 - DNA, 11 bp, Unknown
  misc_feature (1)..( 11): Result.005 file - promoters50/3434652
ttgtatctaaa

SEQ ID NO: 183176 - DNA, 11 bp, Unknown
  misc_feature (1)..( 11): Result.005 file - promoters50/3434652
ttgtaactatt

SEQ ID NO: 183177 - DNA, 8 bp, Unknown
  misc_feature (1)..( 8): Result.005 file - promoters50/3434652
tgtattat

SEQ ID NO: 183178 - DNA, 8 bp, Unknown
  misc_feature (1)..( 8): Result.005 file - promoters50/3434652
tgttttat

SEQ ID NO: 183179 - DNA, 8 bp, Unknown
  misc_feature (1)..( 8): Result.005 file - promoters50/3434652
tttttttt

SEQ ID NO: 183180 - DNA, 10 bp, Unknown
  misc_feature (1)..( 10): Result.005 file - promoters50/3434652
tttaattata

SEQ ID NO: 183181 - DNA, 10 bp, Unknown
  misc_feature (1)..( 10): Result.005 file - promoters50/3434652
tttaactata

SEQ ID NO: 183182 - DNA, 10 bp, Unknown
  misc_feature (1)..( 10): Result.005 file - promoters50/3434652
aacaactatt

SEQ ID NO: 183183 - DNA, 10 bp, Unknown
  misc_feature (1)..( 10): Result.005 file - promoters50/3434652
ttgcactatt

SEQ ID NO: 183184 - DNA, 9 bp, Unknown
  misc_feature (1)..( 9): Result.005 file - promoters50/3434652
taaagtcaa

SEQ ID NO: 183185 - DNA, 9 bp, Unknown
  misc_feature (1)..( 9): Result.005 file - promoters50/3434652
catagtcaa

SEQ ID NO: 183186 - DNA, 9 bp, Unknown
  misc_feature (1)..( 9): Result.005 file - promoters50/3434652
catattcac

SEQ ID NO: 183187 - DNA, 9 bp, Unknown
  misc_feature (1)..( 9): Result.005 file - promoters50/3434652
catatttat

SEQ ID NO: 183188 - DNA, 6 bp, Unknown
  misc_feature (1)..( 6): Result.005 file - promoters50/3434652
attaaa

SEQ ID NO: 183189 - DNA, 6 bp, Unknown
  misc_feature (1)..( 6): Result.005 file - promoters50/3434652
attaaa

SEQ ID NO: 183190 - DNA, 6 bp, Unknown
  misc_feature (1)..( 6): Result.005 file - promoters50/3434652
attaaa

SEQ ID NO: 183191 - DNA, 7 bp, Unknown
  misc_feature (1)..( 7): Result.005 file - promoters50/3434652
cctattc

SEQ ID NO: 183192 - DNA, 7 bp, Unknown
  misc_feature (1)..( 7): Result.005 file - promoters50/3434652
actattc

SEQ ID NO: 183193 - DNA, 7 bp, Unknown
  misc_feature (1)..( 7): Result.005 file - promoters50/3434652
actattg

SEQ ID NO: 183194 - DNA, 8 bp, Unknown
  misc_feature (1)..( 8): Result.005 file - promoters50/3434652
ctaatatt

SEQ ID NO: 183195 - DNA, 8 bp, Unknown
  misc_feature (1)..( 8): Result.005 file - promoters50/3434652
ctaaaatt

SEQ ID NO: 183196 - DNA, 8 bp, Unknown
  misc_feature (1)..( 8): Result.005 file - promoters50/3434652
ttaaaatg

SEQ ID NO: 183197 - DNA, 9 bp, Unknown
  misc_feature (1)..( 9): Result.005 file - promoters50/3434652
acactttag

SEQ ID NO: 183198 - DNA, 9 bp, Unknown
  misc_feature (1)..( 9): Result.005 file - promoters50/3434652
ttactatag

SEQ ID NO: 183199 - DNA, 9 bp, Unknown
  misc_feature (1)..( 9): Result.005 file - promoters50/3434652
ttattatac

SEQ ID NO: 183200 - DNA, 9 bp, Unknown
  misc_feature (1)..( 9): Result.005 file - promoters50/3434652
agttttgtt

SEQ ID NO: 183201 - DNA, 9 bp, Unknown
  misc_feature (1)..( 9): Result.005 file - promoters50/3434652
aattttgta

SEQ ID NO: 183202 - DNA, 9 bp, Unknown
  misc_feature (1)..( 9): Result.005 file - promoters50/3434652
aattatgta

SEQ ID NO: 183203 - DNA, 10 bp, Unknown
  misc_feature (1)..( 10): Result.005 file - promoters50/3434652
ttagttacaa

SEQ ID NO: 183204 - DNA, 10 bp, Unknown
  misc_feature (1)..( 10): Result.005 file - promoters50/3434652
caggtttcaa

SEQ ID NO: 183205 - DNA, 10 bp, Unknown
  misc_feature (1)..( 10): Result.005 file - promoters50/3434652
cagctttctt

SEQ ID NO: 183206 - DNA, 7 bp, Unknown
  misc_feature (1)..( 7): Result.005 file - promoters50/3434652
taaaaca

SEQ ID NO: 183207 - DNA, 7 bp, Unknown
  misc_feature (1)..( 7): Result.005 file - promoters50/3434652
aaaaaca

SEQ ID NO: 183208 - DNA, 8 bp, Unknown
  misc_feature (1)..( 8): Result.005 file - promoters50/3434652
gaacaact

SEQ ID NO: 183209 - DNA, 12 bp, Unknown
  misc_feature (1)..( 12): Result.005 file - promoters50/3434765
gtatataaatcc

SEQ ID NO: 183210 - DNA, 12 bp, Unknown
  misc_feature (1)..( 12): Result.005 file - promoters50/3434765
atatataagtat

SEQ ID NO: 183211 - DNA, 12 bp, Unknown
  misc_feature (1)..( 12): Result.005 file - promoters50/3434765
tactataaatct

SEQ ID NO: 183212 - DNA, 12 bp, Unknown
  misc_feature (1)..( 12): Result.005 file - promoters50/3434765
atttatgaatcc

SEQ ID NO: 183213 - DNA, 12 bp, Unknown
  misc_feature (1)..( 12): Result.005 file - promoters50/3434765
tcttataaataa

SEQ ID NO: 183214 - DNA, 12 bp, Unknown
  misc_feature (1)..( 12): Result.005 file - promoters50/3434765
gaaaaaaaatat

SEQ ID NO: 183215 - DNA, 11 bp, Unknown
  misc_feature (1)..( 11): Result.005 file - promoters50/3434796
tctcctataaa

SEQ ID NO: 183216 - DNA, 11 bp, Unknown
  misc_feature (1)..( 11): Result.005 file - promoters50/3434796
aagactaaaaa

SEQ ID NO: 183217 - DNA, 11 bp, Unknown
  misc_feature (1)..( 11): Result.005 file - promoters50/3434796
gtcactaaaaa

SEQ ID NO: 183218 - DNA, 11 bp, Unknown
  misc_feature (1)..( 11): Result.005 file - promoters50/3434796
aagaataaaaa

SEQ ID NO: 183219 - DNA, 11 bp, Unknown
  misc_feature (1)..( 11): Result.005 file - promoters50/3434796
cagaataacga

SEQ ID NO: 183220 - DNA, 9 bp, Unknown
  misc_feature (1)..( 9): Result.005 file - promoters50/3434876
ctaacaaga

SEQ ID NO: 183221 - DNA, 9 bp, Unknown
  misc_feature (1)..( 9): Result.005 file - promoters50/3434876
ttaacaaac

SEQ ID NO: 183222 - DNA, 9 bp, Unknown
  misc_feature (1)..( 9): Result.005 file - promoters50/3434876
ttatcaaac

SEQ ID NO: 183223 - DNA, 11 bp, Unknown
  misc_feature (1)..( 11): Result.005 file - promoters50/3434880
aagaaacaaag

SEQ ID NO: 183224 - DNA, 11 bp, Unknown
  misc_feature (1)..( 11): Result.005 file - promoters50/3434880
aagaaaaaaaa

SEQ ID NO: 183225 - DNA, 11 bp, Unknown
  misc_feature (1)..( 11): Result.005 file - promoters50/3434880
aagaaaagaca

SEQ ID NO: 183226 - DNA, 11 bp, Unknown
  misc_feature (1)..( 11): Result.005 file - promoters50/3434880
gggaaacaaag

SEQ ID NO: 183227 - DNA, 11 bp, Unknown
  misc_feature (1)..( 11): Result.005 file - promoters50/3434880
gccaaacaaca

SEQ ID NO: 183228 - DNA, 11 bp, Unknown
  misc_feature (1)..( 11): Result.005 file - promoters50/3434880
tccaaacaaaa

SEQ ID NO: 183229 - DNA, 11 bp, Unknown
  misc_feature (1)..( 11): Result.005 file - promoters50/3434880
tgtcgacaaaa

SEQ ID NO: 183230 - DNA, 15 bp, Unknown
  misc_feature (1)..( 15): Result.005 file - promoters50/3434880
aagccatattgatta

SEQ ID NO: 183231 - DNA, 15 bp, Unknown
  misc_feature (1)..( 15): Result.005 file - promoters50/3434880
ttcctatattgtcaa

SEQ ID NO: 183232 - DNA, 15 bp, Unknown
  misc_feature (1)..( 15): Result.005 file - promoters50/3434880
aagtcatatttggat

SEQ ID NO: 183233 - DNA, 15 bp, Unknown
  misc_feature (1)..( 15): Result.005 file - promoters50/3434880
attttttatttatta

SEQ ID NO: 183234 - DNA, 15 bp, Unknown
  misc_feature (1)..( 15): Result.005 file - promoters50/3434880
tataaatattttagg

SEQ ID NO: 183235 - DNA, 15 bp, Unknown
  misc_feature (1)..( 15): Result.005 file - promoters50/3434880
actgtcaattcactg

SEQ ID NO: 183236 - DNA, 9 bp, Unknown
  misc_feature (1)..( 9): Result.005 file - promoters50/3434912
ggtttctag

SEQ ID NO: 183237 - DNA, 9 bp, Unknown
  misc_feature (1)..( 9): Result.005 file - promoters50/3434912
tgtttcttc

SEQ ID NO: 183238 - DNA, 9 bp, Unknown
  misc_feature (1)..( 9): Result.005 file - promoters50/3434912
ggtttcttg

SEQ ID NO: 183239 - DNA, 9 bp, Unknown
  misc_feature (1)..( 9): Result.005 file - promoters50/3434912
ggtttgttg

SEQ ID NO: 183240 - DNA, 9 bp, Unknown
  misc_feature (1)..( 9): Result.005 file - promoters50/3434912
atttttttc

SEQ ID NO: 183241 - DNA, 9 bp, Unknown
  misc_feature (1)..( 9): Result.005 file - promoters50/3434912
catttctcc

SEQ ID NO: 183242 - DNA, 9 bp, Unknown
  misc_feature (1)..( 9): Result.005 file - promoters50/3434936
tctaaagaa

SEQ ID NO: 183243 - DNA, 9 bp, Unknown
  misc_feature (1)..( 9): Result.005 file - promoters50/3434936
tataaagaa

SEQ ID NO: 183244 - DNA, 9 bp, Unknown
  misc_feature (1)..( 9): Result.005 file - promoters50/3434936
tattaagca

SEQ ID NO: 183245 - DNA, 9 bp, Unknown
  misc_feature (1)..( 9): Result.005 file - promoters50/3434952
ttttgttga

SEQ ID NO: 183246 - DNA, 9 bp, Unknown
  misc_feature (1)..( 9): Result.005 file - promoters50/3434952
gagtgttga

SEQ ID NO: 183247 - DNA, 9 bp, Unknown
  misc_feature (1)..( 9): Result.005 file - promoters50/3434952
ttttattgt

SEQ ID NO: 183248 - DNA, 9 bp, Unknown
  misc_feature (1)..( 9): Result.005 file - promoters50/3434952
tatgtagaa

SEQ ID NO: 183249 - DNA, 9 bp, Unknown
  misc_feature (1)..( 9): Result.005 file - promoters50/3434952
aatgttgaa

SEQ ID NO: 183250 - DNA, 9 bp, Unknown
  misc_feature (1)..( 9): Result.005 file - promoters50/3434952
aatggtgac

SEQ ID NO: 183251 - DNA, 8 bp, Unknown
  misc_feature (1)..( 8): Result.005 file - promoters50/3435031
catatttc

SEQ ID NO: 183252 - DNA, 8 bp, Unknown
  misc_feature (1)..( 8): Result.005 file - promoters50/3435031
tatatttt

SEQ ID NO: 183253 - DNA, 9 bp, Unknown
  misc_feature (1)..( 9): Result.005 file - promoters50/3435031
aatatgttt

SEQ ID NO: 183254 - DNA, 10 bp, Unknown
  misc_feature (1)..( 10): Result.005 file - promoters50/3435057
gttataatat

SEQ ID NO: 183255 - DNA, 10 bp, Unknown
  misc_feature (1)..( 10): Result.005 file - promoters50/3435057
gttatcataa

SEQ ID NO: 183256 - DNA, 10 bp, Unknown
  misc_feature (1)..( 10): Result.005 file - promoters50/3435057
taaatcatac

SEQ ID NO: 183257 - DNA, 10 bp, Unknown
  misc_feature (1)..( 10): Result.005 file - promoters50/3435057
caattcataa

SEQ ID NO: 183258 - DNA, 7 bp, Unknown
  misc_feature (1)..( 7): Result.005 file - promoters50/3435057
tcataaa

SEQ ID NO: 183259 - DNA, 7 bp, Unknown
  misc_feature (1)..( 7): Result.005 file - promoters50/3435057
ccataaa

SEQ ID NO: 183260 - DNA, 7 bp, Unknown
  misc_feature (1)..( 7): Result.005 file - promoters50/3435057
tcataac

SEQ ID NO: 183261 - DNA, 8 bp, Unknown
  misc_feature (1)..( 8): Result.005 file - promoters50/3435057
gcattaaa

SEQ ID NO: 183262 - DNA, 11 bp, Unknown
  misc_feature (1)..( 11): Result.005 file - promoters50/3435057
acattatagat

SEQ ID NO: 183263 - DNA, 11 bp, Unknown
  misc_feature (1)..( 11): Result.005 file - promoters50/3435057
tttttattgat

SEQ ID NO: 183264 - DNA, 11 bp, Unknown
  misc_feature (1)..( 11): Result.005 file - promoters50/3435057
ttttaatttct

SEQ ID NO: 183265 - DNA, 12 bp, Unknown
  misc_feature (1)..( 12): Result.005 file - promoters50/3435057
tttgttattaat

SEQ ID NO: 183266 - DNA, 9 bp, Unknown
  misc_feature (1)..( 9): Result.005 file - promoters50/3435091
ttacaaaaa

SEQ ID NO: 183267 - DNA, 9 bp, Unknown
  misc_feature (1)..( 9): Result.005 file - promoters50/3435091
ttactaaaa

SEQ ID NO: 183268 - DNA, 9 bp, Unknown
  misc_feature (1)..( 9): Result.005 file - promoters50/3435091
agaaaaaaa

SEQ ID NO: 183269 - DNA, 9 bp, Unknown
  misc_feature (1)..( 9): Result.005 file - promoters50/3435091
ttataaagt

SEQ ID NO: 183270 - DNA, 9 bp, Unknown
  misc_feature (1)..( 9): Result.005 file - promoters50/3435091
ttactaagg

SEQ ID NO: 183271 - DNA, 9 bp, Unknown
  misc_feature (1)..( 9): Result.005 file - promoters50/3435091
ttataagtc

SEQ ID NO: 183272 - DNA, 9 bp, Unknown
  misc_feature (1)..( 9): Result.005 file - promoters50/3435091
atatatagt

SEQ ID NO: 183273 - DNA, 9 bp, Unknown
  misc_feature (1)..( 9): Result.005 file - promoters50/3435091
tatatttga

SEQ ID NO: 183274 - DNA, 9 bp, Unknown
  misc_feature (1)..( 9): Result.005 file - promoters50/3435091
tattttttt

SEQ ID NO: 183275 - DNA, 9 bp, Unknown
  misc_feature (1)..( 9): Result.005 file - promoters50/3435091
tatttttga

SEQ ID NO: 183276 - DNA, 9 bp, Unknown
  misc_feature (1)..( 9): Result.005 file - promoters50/3435091
ggttttttc

SEQ ID NO: 183277 - DNA, 9 bp, Unknown
  misc_feature (1)..( 9): Result.005 file - promoters50/3435091
catatttgg

SEQ ID NO: 183278 - DNA, 9 bp, Unknown
  misc_feature (1)..( 9): Result.005 file - promoters50/3435091
gctttttga

SEQ ID NO: 183279 - DNA, 9 bp, Unknown
  misc_feature (1)..( 9): Result.005 file - promoters50/3435091
agttataaa

SEQ ID NO: 183280 - DNA, 9 bp, Unknown
  misc_feature (1)..( 9): Result.005 file - promoters50/3435091
ccttataat

SEQ ID NO: 183281 - DNA, 9 bp, Unknown
  misc_feature (1)..( 9): Result.005 file - promoters50/3435091
ttttagaaa

SEQ ID NO: 183282 - DNA, 9 bp, Unknown
  misc_feature (1)..( 9): Result.005 file - promoters50/3435091
ccttatact

SEQ ID NO: 183283 - DNA, 9 bp, Unknown
  misc_feature (1)..( 9): Result.005 file - promoters50/3435091
gattataaa

SEQ ID NO: 183284 - DNA, 9 bp, Unknown
  misc_feature (1)..( 9): Result.005 file - promoters50/3435091
gattaaaat

SEQ ID NO: 183285 - DNA, 9 bp, Unknown
  misc_feature (1)..( 9): Result.005 file - promoters50/3435125
aaaatcaaa

SEQ ID NO: 183286 - DNA, 9 bp, Unknown
  misc_feature (1)..( 9): Result.005 file - promoters50/3435125
ttaataaaa

SEQ ID NO: 183287 - DNA, 10 bp, Unknown
  misc_feature (1)..( 10): Result.005 file - promoters50/3435125
aaaactcaaa

SEQ ID NO: 183288 - DNA, 10 bp, Unknown
  misc_feature (1)..( 10): Result.005 file - promoters50/3435125
agaaaacaac

SEQ ID NO: 183289 - DNA, 12 bp, Unknown
  misc_feature (1)..( 12): Result.005 file - promoters50/3435133
gaaatagattga

SEQ ID NO: 183290 - DNA, 12 bp, Unknown
  misc_feature (1)..( 12): Result.005 file - promoters50/3435133
ttagtagattca

SEQ ID NO: 183291 - DNA, 12 bp, Unknown
  misc_feature (1)..( 12): Result.005 file - promoters50/3435133
tatataaattaa

SEQ ID NO: 183292 - DNA, 12 bp, Unknown
  misc_feature (1)..( 12): Result.005 file - promoters50/3435133
gaaaaagatagc

SEQ ID NO: 183293 - DNA, 12 bp, Unknown
  misc_feature (1)..( 12): Result.005 file - promoters50/3435133
gaaatatataaa

SEQ ID NO: 183294 - DNA, 13 bp, Unknown
  misc_feature (1)..( 13): Result.005 file - promoters50/3435133
tcatatttgtata

SEQ ID NO: 183295 - DNA, 13 bp, Unknown
  misc_feature (1)..( 13): Result.005 file - promoters50/3435133
aaataattgtata

SEQ ID NO: 183296 - DNA, 13 bp, Unknown
  misc_feature (1)..( 13): Result.005 file - promoters50/3435133
aaaatcttgtata

SEQ ID NO: 183297 - DNA, 13 bp, Unknown
  misc_feature (1)..( 13): Result.005 file - promoters50/3435133
ctaaaatagtaaa

SEQ ID NO: 183298 - DNA, 13 bp, Unknown
  misc_feature (1)..( 13): Result.005 file - promoters50/3435133
aaagaattgaaca

SEQ ID NO: 183299 - DNA, 9 bp, Unknown
  misc_feature (1)..( 9): Result.005 file - promoters50/3435133
gtataaatt

SEQ ID NO: 183300 - DNA, 9 bp, Unknown
  misc_feature (1)..( 9): Result.005 file - promoters50/3435133
ttattaatt

SEQ ID NO: 183301 - DNA, 9 bp, Unknown
  misc_feature (1)..( 9): Result.005 file - promoters50/3435133
ttactaaaa

SEQ ID NO: 183302 - DNA, 10 bp, Unknown
  misc_feature (1)..( 10): Result.005 file - promoters50/3435133
gaactgaaag

SEQ ID NO: 183303 - DNA, 10 bp, Unknown
  misc_feature (1)..( 10): Result.005 file - promoters50/3435133
taactgaaaa

SEQ ID NO: 183304 - DNA, 7 bp, Unknown
  misc_feature (1)..( 7): Result.005 file - promoters50/3435151
atacttt

SEQ ID NO: 183305 - DNA, 7 bp, Unknown
  misc_feature (1)..( 7): Result.005 file - promoters50/3435151
atatttt

SEQ ID NO: 183306 - DNA, 7 bp, Unknown
  misc_feature (1)..( 7): Result.005 file - promoters50/3435151
ataaatt

SEQ ID NO: 183307 - DNA, 9 bp, Unknown
  misc_feature (1)..( 9): Result.005 file - promoters50/3435151
ctaaaaaaa

SEQ ID NO: 183308 - DNA, 9 bp, Unknown
  misc_feature (1)..( 9): Result.005 file - promoters50/3435151
ccaaaaaaa

SEQ ID NO: 183309 - DNA, 9 bp, Unknown
  misc_feature (1)..( 9): Result.005 file - promoters50/3435151
ctaaaaagt

SEQ ID NO: 183310 - DNA, 9 bp, Unknown
  misc_feature (1)..( 9): Result.005 file - promoters50/3435151
taaaatgtt

SEQ ID NO: 183311 - DNA, 9 bp, Unknown
  misc_feature (1)..( 9): Result.005 file - promoters50/3435151
gcaaatgtt

SEQ ID NO: 183312 - DNA, 9 bp, Unknown
  misc_feature (1)..( 9): Result.005 file - promoters50/3435151
taaaaagtt

SEQ ID NO: 183313 - DNA, 9 bp, Unknown
  misc_feature (1)..( 9): Result.005 file - promoters50/3435169
aaaaatttc

SEQ ID NO: 183314 - DNA, 9 bp, Unknown
  misc_feature (1)..( 9): Result.005 file - promoters50/3435169
aaaaatgaa

SEQ ID NO: 183315 - DNA, 9 bp, Unknown
  misc_feature (1)..( 9): Result.005 file - promoters50/3435169
caaagtttc

SEQ ID NO: 183316 - DNA, 9 bp, Unknown
  misc_feature (1)..( 9): Result.005 file - promoters50/3435169
aacatctca

SEQ ID NO: 183317 - DNA, 9 bp, Unknown
  misc_feature (1)..( 9): Result.005 file - promoters50/3435169
atcatttca

SEQ ID NO: 183318 - DNA, 9 bp, Unknown
  misc_feature (1)..( 9): Result.005 file - promoters50/3435169
aacttctac

SEQ ID NO: 183319 - DNA, 10 bp, Unknown
  misc_feature (1)..( 10): Result.005 file - promoters50/3435185
ttgtaaatta

SEQ ID NO: 183320 - DNA, 10 bp, Unknown
  misc_feature (1)..( 10): Result.005 file - promoters50/3435185
gagtaaataa

SEQ ID NO: 183321 - DNA, 10 bp, Unknown
  misc_feature (1)..( 10): Result.005 file - promoters50/3435185
ttgtaaaaaa

SEQ ID NO: 183322 - DNA, 10 bp, Unknown
  misc_feature (1)..( 10): Result.005 file - promoters50/3435185
gagtaacaaa

SEQ ID NO: 183323 - DNA, 10 bp, Unknown
  misc_feature (1)..( 10): Result.005 file - promoters50/3435185
ccaaaacaaa

SEQ ID NO: 183324 - DNA, 8 bp, Unknown
  misc_feature (1)..( 8): Result.005 file - promoters50/3435185
gaaaaaaa

SEQ ID NO: 183325 - DNA, 8 bp, Unknown
  misc_feature (1)..( 8): Result.005 file - promoters50/3435185
aaaacaaa

SEQ ID NO: 183326 - DNA, 8 bp, Unknown
  misc_feature (1)..( 8): Result.005 file - promoters50/3435185
aaaacaaa

SEQ ID NO: 183327 - DNA, 9 bp, Unknown
  misc_feature (1)..( 9): Result.005 file - promoters50/3435185
agtaacaaa

SEQ ID NO: 183328 - DNA, 9 bp, Unknown
  misc_feature (1)..( 9): Result.005 file - promoters50/3435185
aaatacaat

SEQ ID NO: 183329 - DNA, 14 bp, Unknown
  misc_feature (1)..( 14): Result.005 file - promoters50/3435227
cttctataaatcaa

SEQ ID NO: 183330 - DNA, 14 bp, Unknown
  misc_feature (1)..( 14): Result.005 file - promoters50/3435227
cttctataaaacaa

SEQ ID NO: 183331 - DNA, 14 bp, Unknown
  misc_feature (1)..( 14): Result.005 file - promoters50/3435227
ttgccggaaaacaa

SEQ ID NO: 183332 - DNA, 8 bp, Unknown
  misc_feature (1)..( 8): Result.005 file - promoters50/3435239
tctcgttt

SEQ ID NO: 183333 - DNA, 8 bp, Unknown
  misc_feature (1)..( 8): Result.005 file - promoters50/3435239
tcttgttt

SEQ ID NO: 183334 - DNA, 8 bp, Unknown
  misc_feature (1)..( 8): Result.005 file - promoters50/3435239
tctttttt

SEQ ID NO: 183335 - DNA, 8 bp, Unknown
  misc_feature (1)..( 8): Result.005 file - promoters50/3435239
aattgttt

SEQ ID NO: 183336 - DNA, 12 bp, Unknown
  misc_feature (1)..( 12): Result.005 file - promoters50/3435239
ttttattggcca

SEQ ID NO: 183337 - DNA, 12 bp, Unknown
  misc_feature (1)..( 12): Result.005 file - promoters50/3435239
ttttcttgagag

SEQ ID NO: 183338 - DNA, 12 bp, Unknown
  misc_feature (1)..( 12): Result.005 file - promoters50/3435239
agttattgtttt

SEQ ID NO: 183339 - DNA, 12 bp, Unknown
  misc_feature (1)..( 12): Result.005 file - promoters50/3435239
gtttattactgg

SEQ ID NO: 183340 - DNA, 9 bp, Unknown
  misc_feature (1)..( 9): Result.005 file - promoters50/3435239
aaaagaaga

SEQ ID NO: 183341 - DNA, 9 bp, Unknown
  misc_feature (1)..( 9): Result.005 file - promoters50/3435239
aaaagtaga

SEQ ID NO: 183342 - DNA, 9 bp, Unknown
  misc_feature (1)..( 9): Result.005 file - promoters50/3435239
tgaagtagt

SEQ ID NO: 183343 - DNA, 11 bp, Unknown
  misc_feature (1)..( 11): Result.005 file - promoters50/3435239
gacgattttgt

SEQ ID NO: 183344 - DNA, 11 bp, Unknown
  misc_feature (1)..( 11): Result.005 file - promoters50/3435239
gacaattagat

SEQ ID NO: 183345 - DNA, 11 bp, Unknown
  misc_feature (1)..( 11): Result.005 file - promoters50/3435239
gacgattttgt

SEQ ID NO: 183346 - DNA, 9 bp, Unknown
  misc_feature (1)..( 9): Result.005 file - promoters50/3435239
ttttatttt

SEQ ID NO: 183347 - DNA, 9 bp, Unknown
  misc_feature (1)..( 9): Result.005 file - promoters50/3435239
ctttctttt

SEQ ID NO: 183348 - DNA, 9 bp, Unknown
  misc_feature (1)..( 9): Result.005 file - promoters50/3435239
tcttgtttc

SEQ ID NO: 183349 - DNA, 9 bp, Unknown
  misc_feature (1)..( 9): Result.005 file - promoters50/3435239
aattgttta

SEQ ID NO: 183350 - DNA, 13 bp, Unknown
  misc_feature (1)..( 13): Result.005 file - promoters50/3435239
cgttttttattgg

SEQ ID NO: 183351 - DNA, 13 bp, Unknown
  misc_feature (1)..( 13): Result.005 file - promoters50/3435239
tcttttttttgtt

SEQ ID NO: 183352 - DNA, 13 bp, Unknown
  misc_feature (1)..( 13): Result.005 file - promoters50/3435239
tgtttattactgg

SEQ ID NO: 183353 - DNA, 13 bp, Unknown
  misc_feature (1)..( 13): Result.005 file - promoters50/3435239
tcttgtttcttct

SEQ ID NO: 183354 - DNA, 8 bp, Unknown
  misc_feature (1)..( 8): Result.005 file - promoters50/3435239
atttgtat

SEQ ID NO: 183355 - DNA, 8 bp, Unknown
  misc_feature (1)..( 8): Result.005 file - promoters50/3435239
attcgtat

SEQ ID NO: 183356 - DNA, 8 bp, Unknown
  misc_feature (1)..( 8): Result.005 file - promoters50/3435239
gttcttat

SEQ ID NO: 183357 - DNA, 6 bp, Unknown
  misc_feature (1)..( 6): Result.005 file - promoters50/3435239
ttgttt

SEQ ID NO: 183358 - DNA, 6 bp, Unknown
  misc_feature (1)..( 6): Result.005 file - promoters50/3435239
ttgttt

SEQ ID NO: 183359 - DNA, 6 bp, Unknown
  misc_feature (1)..( 6): Result.005 file - promoters50/3435239
ttgttt

SEQ ID NO: 183360 - DNA, 8 bp, Unknown
  misc_feature (1)..( 8): Result.005 file - promoters50/3435239
gtttcttt

SEQ ID NO: 183361 - DNA, 8 bp, Unknown
  misc_feature (1)..( 8): Result.005 file - promoters50/3435239
atttgttt

SEQ ID NO: 183362 - DNA, 8 bp, Unknown
  misc_feature (1)..( 8): Result.005 file - promoters50/3435239
atttgtta

SEQ ID NO: 183363 - DNA, 7 bp, Unknown
  misc_feature (1)..( 7): Result.005 file - promoters50/3435258
taaatta

SEQ ID NO: 183364 - DNA, 7 bp, Unknown
  misc_feature (1)..( 7): Result.005 file - promoters50/3435258
taaattt

SEQ ID NO: 183365 - DNA, 7 bp, Unknown
  misc_feature (1)..( 7): Result.005 file - promoters50/3435258
caaattt

SEQ ID NO: 183366 - DNA, 8 bp, Unknown
  misc_feature (1)..( 8): Result.005 file - promoters50/3435258
aaattaat

SEQ ID NO: 183367 - DNA, 8 bp, Unknown
  misc_feature (1)..( 8): Result.005 file - promoters50/3435258
aaattaaa

SEQ ID NO: 183368 - DNA, 8 bp, Unknown
  misc_feature (1)..( 8): Result.005 file - promoters50/3435258
caatcaaa

SEQ ID NO: 183369 - DNA, 11 bp, Unknown
  misc_feature (1)..( 11): Result.005 file - promoters50/3435258
attattaattt

SEQ ID NO: 183370 - DNA, 11 bp, Unknown
  misc_feature (1)..( 11): Result.005 file - promoters50/3435258
attaataaata

SEQ ID NO: 183371 - DNA, 11 bp, Unknown
  misc_feature (1)..( 11): Result.005 file - promoters50/3435258
attattcattt

SEQ ID NO: 183372 - DNA, 12 bp, Unknown
  misc_feature (1)..( 12): Result.005 file - promoters50/3435258
attattaattta

SEQ ID NO: 183373 - DNA, 12 bp, Unknown
  misc_feature (1)..( 12): Result.005 file - promoters50/3435258
ctctgtaaatta

SEQ ID NO: 183374 - DNA, 12 bp, Unknown
  misc_feature (1)..( 12): Result.005 file - promoters50/3435258
attattcatttt

SEQ ID NO: 183375 - DNA, 8 bp, Unknown
  misc_feature (1)..( 8): Result.005 file - promoters50/3435258
tattaaat

SEQ ID NO: 183376 - DNA, 8 bp, Unknown
  misc_feature (1)..( 8): Result.005 file - promoters50/3435258
tattaatt

SEQ ID NO: 183377 - DNA, 8 bp, Unknown
  misc_feature (1)..( 8): Result.005 file - promoters50/3435258
tatgaaat

SEQ ID NO: 183378 - DNA, 9 bp, Unknown
  misc_feature (1)..( 9): Result.005 file - promoters50/3435258
tttatggat

SEQ ID NO: 183379 - DNA, 9 bp, Unknown
  misc_feature (1)..( 9): Result.005 file - promoters50/3435258
tttatcgat

SEQ ID NO: 183380 - DNA, 9 bp, Unknown
  misc_feature (1)..( 9): Result.005 file - promoters50/3435258
tttatgaaa

SEQ ID NO: 183381 - DNA, 9 bp, Unknown
  misc_feature (1)..( 9): Result.005 file - promoters50/3435258
tattaaatt

SEQ ID NO: 183382 - DNA, 9 bp, Unknown
  misc_feature (1)..( 9): Result.005 file - promoters50/3435258
cgataaatt

SEQ ID NO: 183383 - DNA, 9 bp, Unknown
  misc_feature (1)..( 9): Result.005 file - promoters50/3435258
tatgaaatg

SEQ ID NO: 183384 - DNA, 8 bp, Unknown
  misc_feature (1)..( 8): Result.005 file - promoters50/3435258
caaattaa

SEQ ID NO: 183385 - DNA, 8 bp, Unknown
  misc_feature (1)..( 8): Result.005 file - promoters50/3435258
taaattaa

SEQ ID NO: 183386 - DNA, 8 bp, Unknown
  misc_feature (1)..( 8): Result.005 file - promoters50/3435258
caatttag

SEQ ID NO: 183387 - DNA, 12 bp, Unknown
  misc_feature (1)..( 12): Result.005 file - promoters50/3435258
tttatatataag

SEQ ID NO: 183388 - DNA, 12 bp, Unknown
  misc_feature (1)..( 12): Result.005 file - promoters50/3435258
tttatagagatt

SEQ ID NO: 183389 - DNA, 13 bp, Unknown
  misc_feature (1)..( 13): Result.005 file - promoters50/3435258
ttctatatatata

SEQ ID NO: 183390 - DNA, 9 bp, Unknown
  misc_feature (1)..( 9): Result.005 file - promoters50/3435258
ttttggaaa

SEQ ID NO: 183391 - DNA, 9 bp, Unknown
  misc_feature (1)..( 9): Result.005 file - promoters50/3435258
atttggaat

SEQ ID NO: 183392 - DNA, 9 bp, Unknown
  misc_feature (1)..( 9): Result.005 file - promoters50/3435258
atttgtaat

SEQ ID NO: 183393 - DNA, 12 bp, Unknown
  misc_feature (1)..( 12): Result.005 file - promoters50/3435274
caggattgattt

SEQ ID NO: 183394 - DNA, 12 bp, Unknown
  misc_feature (1)..( 12): Result.005 file - promoters50/3435274
caggatttatta

SEQ ID NO: 183395 - DNA, 12 bp, Unknown
  misc_feature (1)..( 12): Result.005 file - promoters50/3435274
agttgtttttta

SEQ ID NO: 183396 - DNA, 9 bp, Unknown
  misc_feature (1)..( 9): Result.005 file - promoters50/3435282
tttatgtat

SEQ ID NO: 183397 - DNA, 9 bp, Unknown
  misc_feature (1)..( 9): Result.005 file - promoters50/3435282
gttatgttt

SEQ ID NO: 183398 - DNA, 9 bp, Unknown
  misc_feature (1)..( 9): Result.005 file - promoters50/3435282
aatatattt

SEQ ID NO: 183399 - DNA, 9 bp, Unknown
  misc_feature (1)..( 9): Result.005 file - promoters50/3435282
attattttt

SEQ ID NO: 183400 - DNA, 9 bp, Unknown
  misc_feature (1)..( 9): Result.005 file - promoters50/3435282
cttttttaa

SEQ ID NO: 183401 - DNA, 9 bp, Unknown
  misc_feature (1)..( 9): Result.005 file - promoters50/3435282
tttattgct

SEQ ID NO: 183402 - DNA, 9 bp, Unknown
  misc_feature (1)..( 9): Result.005 file - promoters50/3435282
ataattata

SEQ ID NO: 183403 - DNA, 14 bp, Unknown
  misc_feature (1)..( 14): Result.005 file - promoters50/3435282
ttcaaatattaaaa

SEQ ID NO: 183404 - DNA, 14 bp, Unknown
  misc_feature (1)..( 14): Result.005 file - promoters50/3435282
aaaaaagattttat

SEQ ID NO: 183405 - DNA, 14 bp, Unknown
  misc_feature (1)..( 14): Result.005 file - promoters50/3435282
tgcaaattttattg

SEQ ID NO: 183406 - DNA, 14 bp, Unknown
  misc_feature (1)..( 14): Result.005 file - promoters50/3435282
atgaaaaattaaaa

SEQ ID NO: 183407 - DNA, 14 bp, Unknown
  misc_feature (1)..( 14): Result.005 file - promoters50/3435282
ttctaataattata

SEQ ID NO: 183408 - DNA, 14 bp, Unknown
  misc_feature (1)..( 14): Result.005 file - promoters50/3435282
gttgtattttattc

SEQ ID NO: 183409 - DNA, 14 bp, Unknown
  misc_feature (1)..( 14): Result.005 file - promoters50/3435282
tgattattttttgg

SEQ ID NO: 183410 - DNA, 9 bp, Unknown
  misc_feature (1)..( 9): Result.005 file - promoters50/3435282
ataatatct

SEQ ID NO: 183411 - DNA, 9 bp, Unknown
  misc_feature (1)..( 9): Result.005 file - promoters50/3435282
atattataa

SEQ ID NO: 183412 - DNA, 9 bp, Unknown
  misc_feature (1)..( 9): Result.005 file - promoters50/3435282
gtaaaatcc

SEQ ID NO: 183413 - DNA, 9 bp, Unknown
  misc_feature (1)..( 9): Result.005 file - promoters50/3435282
atattatca

SEQ ID NO: 183414 - DNA, 9 bp, Unknown
  misc_feature (1)..( 9): Result.005 file - promoters50/3435282
ttaatttct

SEQ ID NO: 183415 - DNA, 9 bp, Unknown
  misc_feature (1)..( 9): Result.005 file - promoters50/3435282
atagattca

SEQ ID NO: 183416 - DNA, 14 bp, Unknown
  misc_feature (1)..( 14): Result.005 file - promoters50/3435282
aattttaaaattta

SEQ ID NO: 183417 - DNA, 14 bp, Unknown
  misc_feature (1)..( 14): Result.005 file - promoters50/3435282
aattgaaaacttta

SEQ ID NO: 183418 - DNA, 14 bp, Unknown
  misc_feature (1)..( 14): Result.005 file - promoters50/3435282
aatattaaaatttg

SEQ ID NO: 183419 - DNA, 14 bp, Unknown
  misc_feature (1)..( 14): Result.005 file - promoters50/3435282
tctgtagaactttc

SEQ ID NO: 183420 - DNA, 15 bp, Unknown
  misc_feature (1)..( 15): Result.005 file - promoters50/3435282
acggatgagatctta

SEQ ID NO: 183421 - DNA, 15 bp, Unknown
  misc_feature (1)..( 15): Result.005 file - promoters50/3435282
atcactgtcatatta

SEQ ID NO: 183422 - DNA, 15 bp, Unknown
  misc_feature (1)..( 15): Result.005 file - promoters50/3435282
tctgctttaatctta

SEQ ID NO: 183423 - DNA, 11 bp, Unknown
  misc_feature (1)..( 11): Result.005 file - promoters50/3435282
ccaagaaatag

SEQ ID NO: 183424 - DNA, 11 bp, Unknown
  misc_feature (1)..( 11): Result.005 file - promoters50/3435282
gttagaaataa

SEQ ID NO: 183425 - DNA, 11 bp, Unknown
  misc_feature (1)..( 11): Result.005 file - promoters50/3435282
ccaataaatcc

SEQ ID NO: 183426 - DNA, 11 bp, Unknown
  misc_feature (1)..( 11): Result.005 file - promoters50/3435282
tgaagatatat

SEQ ID NO: 183427 - DNA, 11 bp, Unknown
  misc_feature (1)..( 11): Result.005 file - promoters50/3435282
aactaaaataa

SEQ ID NO: 183428 - DNA, 12 bp, Unknown
  misc_feature (1)..( 12): Result.005 file - promoters50/3435282
cgaagaagattg

SEQ ID NO: 183429 - DNA, 8 bp, Unknown
  misc_feature (1)..( 8): Result.005 file - promoters50/3435341
attggttt

SEQ ID NO: 183430 - DNA, 8 bp, Unknown
  misc_feature (1)..( 8): Result.005 file - promoters50/3435341
attggtaa

SEQ ID NO: 183431 - DNA, 8 bp, Unknown
  misc_feature (1)..( 8): Result.005 file - promoters50/3435341
tttggttt

SEQ ID NO: 183432 - DNA, 6 bp, Unknown
  misc_feature (1)..( 6): Result.005 file - promoters50/3435372
acatac

SEQ ID NO: 183433 - DNA, 6 bp, Unknown
  misc_feature (1)..( 6): Result.005 file - promoters50/3435372
acatac

SEQ ID NO: 183434 - DNA, 6 bp, Unknown
  misc_feature (1)..( 6): Result.005 file - promoters50/3435372
acatac

SEQ ID NO: 183435 - DNA, 7 bp, Unknown
  misc_feature (1)..( 7): Result.005 file - promoters50/3435424
tttaaaa

SEQ ID NO: 183436 - DNA, 7 bp, Unknown
  misc_feature (1)..( 7): Result.005 file - promoters50/3435424
tttgaaa

SEQ ID NO: 183437 - DNA, 7 bp, Unknown
  misc_feature (1)..( 7): Result.005 file - promoters50/3435424
tttaaat

SEQ ID NO: 183438 - DNA, 8 bp, Unknown
  misc_feature (1)..( 8): Result.005 file - promoters50/3435424
tacttttt

SEQ ID NO: 183439 - DNA, 8 bp, Unknown
  misc_feature (1)..( 8): Result.005 file - promoters50/3435424
tactgttt

SEQ ID NO: 183440 - DNA, 8 bp, Unknown
  misc_feature (1)..( 8): Result.005 file - promoters50/3435424
gacttttt

SEQ ID NO: 183441 - DNA, 8 bp, Unknown
  misc_feature (1)..( 8): Result.005 file - promoters50/3435424
ttaattta

SEQ ID NO: 183442 - DNA, 8 bp, Unknown
  misc_feature (1)..( 8): Result.005 file - promoters50/3435424
ttactttt

SEQ ID NO: 183443 - DNA, 8 bp, Unknown
  misc_feature (1)..( 8): Result.005 file - promoters50/3435424
gtaattta

SEQ ID NO: 183444 - DNA, 14 bp, Unknown
  misc_feature (1)..( 14): Result.005 file - promoters50/3435452
attttgaccgagtc

SEQ ID NO: 183445 - DNA, 14 bp, Unknown
  misc_feature (1)..( 14): Result.005 file - promoters50/3435452
aatttaacccggga

SEQ ID NO: 183446 - DNA, 14 bp, Unknown
  misc_feature (1)..( 14): Result.005 file - promoters50/3435452
tatttatcccttta

SEQ ID NO: 183447 - DNA, 14 bp, Unknown
  misc_feature (1)..( 14): Result.005 file - promoters50/3435452
aaataatcccctta

SEQ ID NO: 183448 - DNA, 14 bp, Unknown
  misc_feature (1)..( 14): Result.005 file - promoters50/3435452
tatttaagtttata

SEQ ID NO: 183449 - DNA, 14 bp, Unknown
  misc_feature (1)..( 14): Result.005 file - promoters50/3435452
gggaaggcccataa

SEQ ID NO: 183450 - DNA, 10 bp, Unknown
  misc_feature (1)..( 10): Result.005 file - promoters50/3435452
aaaaacaatt

SEQ ID NO: 183451 - DNA, 10 bp, Unknown
  misc_feature (1)..( 10): Result.005 file - promoters50/3435452
ggaaacaaat

SEQ ID NO: 183452 - DNA, 10 bp, Unknown
  misc_feature (1)..( 10): Result.005 file - promoters50/3435452
ctaaaaaatc

SEQ ID NO: 183453 - DNA, 10 bp, Unknown
  misc_feature (1)..( 10): Result.005 file - promoters50/3435452
ttaaccaata

SEQ ID NO: 183454 - DNA, 10 bp, Unknown
  misc_feature (1)..( 10): Result.005 file - promoters50/3435452
ggaaccaaat

SEQ ID NO: 183455 - DNA, 10 bp, Unknown
  misc_feature (1)..( 10): Result.005 file - promoters50/3435452
ataataaata

SEQ ID NO: 183456 - DNA, 13 bp, Unknown
  misc_feature (1)..( 13): Result.005 file - promoters50/3435463
ttttggaaactat

SEQ ID NO: 183457 - DNA, 13 bp, Unknown
  misc_feature (1)..( 13): Result.005 file - promoters50/3435463
aattgaaaacttt

SEQ ID NO: 183458 - DNA, 13 bp, Unknown
  misc_feature (1)..( 13): Result.005 file - promoters50/3435463
aggattaaactaa

SEQ ID NO: 183459 - DNA, 13 bp, Unknown
  misc_feature (1)..( 13): Result.005 file - promoters50/3435463
aatagaatagtat

SEQ ID NO: 183460 - DNA, 13 bp, Unknown
  misc_feature (1)..( 13): Result.005 file - promoters50/3435463
aattaaaataaat

SEQ ID NO: 183461 - DNA, 13 bp, Unknown
  misc_feature (1)..( 13): Result.005 file - promoters50/3435463
tttcacaaacaaa

SEQ ID NO: 183462 - DNA, 11 bp, Unknown
  misc_feature (1)..( 11): Result.005 file - promoters50/3435463
atataaacgac

SEQ ID NO: 183463 - DNA, 11 bp, Unknown
  misc_feature (1)..( 11): Result.005 file - promoters50/3435463
atataaagact

SEQ ID NO: 183464 - DNA, 11 bp, Unknown
  misc_feature (1)..( 11): Result.005 file - promoters50/3435463
atataaataag

SEQ ID NO: 183465 - DNA, 11 bp, Unknown
  misc_feature (1)..( 11): Result.005 file - promoters50/3435463
ataaaaaggac

SEQ ID NO: 183466 - DNA, 11 bp, Unknown
  misc_feature (1)..( 11): Result.005 file - promoters50/3435463
atataaactcc

SEQ ID NO: 183467 - DNA, 11 bp, Unknown
  misc_feature (1)..( 11): Result.005 file - promoters50/3435463
atataaaccat

SEQ ID NO: 183468 - DNA, 12 bp, Unknown
  misc_feature (1)..( 12): Result.005 file - promoters50/3435463
accaaatatgat

SEQ ID NO: 183469 - DNA, 12 bp, Unknown
  misc_feature (1)..( 12): Result.005 file - promoters50/3435463
tttaaatttgat

SEQ ID NO: 183470 - DNA, 12 bp, Unknown
  misc_feature (1)..( 12): Result.005 file - promoters50/3435463
tttaaattaatt

SEQ ID NO: 183471 - DNA, 12 bp, Unknown
  misc_feature (1)..( 12): Result.005 file - promoters50/3435463
agaaaataataa

SEQ ID NO: 183472 - DNA, 12 bp, Unknown
  misc_feature (1)..( 12): Result.005 file - promoters50/3435463
aaaaaaaaatac

SEQ ID NO: 183473 - DNA, 12 bp, Unknown
  misc_feature (1)..( 12): Result.005 file - promoters50/3435463
ataaaaaaatct

SEQ ID NO: 183474 - DNA, 16 bp, Unknown
  misc_feature (1)..( 16): Result.005 file - promoters50/3435463
aaaattaacataattt

SEQ ID NO: 183475 - DNA, 16 bp, Unknown
  misc_feature (1)..( 16): Result.005 file - promoters50/3435463
ccctgtcgcataatat

SEQ ID NO: 183476 - DNA, 16 bp, Unknown
  misc_feature (1)..( 16): Result.005 file - promoters50/3435463
aaaattaaaataaatc

SEQ ID NO: 183477 - DNA, 16 bp, Unknown
  misc_feature (1)..( 16): Result.005 file - promoters50/3435463
aggattaaactaatgt

SEQ ID NO: 183478 - DNA, 16 bp, Unknown
  misc_feature (1)..( 16): Result.005 file - promoters50/3435463
ataaatagaatagtat

SEQ ID NO: 183479 - DNA, 16 bp, Unknown
  misc_feature (1)..( 16): Result.005 file - promoters50/3435463
ctttcacaaacaaaca

SEQ ID NO: 183480 - DNA, 11 bp, Unknown
  misc_feature (1)..( 11): Result.005 file - promoters50/3435463
tttgcaaaatt

SEQ ID NO: 183481 - DNA, 11 bp, Unknown
  misc_feature (1)..( 11): Result.005 file - promoters50/3435463
gaagcaagatt

SEQ ID NO: 183482 - DNA, 11 bp, Unknown
  misc_feature (1)..( 11): Result.005 file - promoters50/3435463
tttggaaatat

SEQ ID NO: 183483 - DNA, 11 bp, Unknown
  misc_feature (1)..( 11): Result.005 file - promoters50/3435463
ttttcaaactt

SEQ ID NO: 183484 - DNA, 11 bp, Unknown
  misc_feature (1)..( 11): Result.005 file - promoters50/3435463
aattcaaaacc

SEQ ID NO: 183485 - DNA, 11 bp, Unknown
  misc_feature (1)..( 11): Result.005 file - promoters50/3435463
tttagaatgcg

SEQ ID NO: 183486 - DNA, 14 bp, Unknown
  misc_feature (1)..( 14): Result.005 file - promoters50/3435463
ataatacaaatatc

SEQ ID NO: 183487 - DNA, 14 bp, Unknown
  misc_feature (1)..( 14): Result.005 file - promoters50/3435463
aaaatacattagga

SEQ ID NO: 183488 - DNA, 14 bp, Unknown
  misc_feature (1)..( 14): Result.005 file - promoters50/3435463
ttcataaaaaaatc

SEQ ID NO: 183489 - DNA, 14 bp, Unknown
  misc_feature (1)..( 14): Result.005 file - promoters50/3435463
aaaatccttgtagc

SEQ ID NO: 183490 - DNA, 14 bp, Unknown
  misc_feature (1)..( 14): Result.005 file - promoters50/3435463
taaatcctagaatc

SEQ ID NO: 183491 - DNA, 14 bp, Unknown
  misc_feature (1)..( 14): Result.005 file - promoters50/3435463
aaaataataatcta

SEQ ID NO: 183492 - DNA, 10 bp, Unknown
  misc_feature (1)..( 10): Result.005 file - promoters50/3435469
gtactttttt

SEQ ID NO: 183493 - DNA, 10 bp, Unknown
  misc_feature (1)..( 10): Result.005 file - promoters50/3435469
tgacttttct

SEQ ID NO: 183494 - DNA, 10 bp, Unknown
  misc_feature (1)..( 10): Result.005 file - promoters50/3435469
gtaatttcaa

SEQ ID NO: 183495 - DNA, 10 bp, Unknown
  misc_feature (1)..( 10): Result.005 file - promoters50/3435469
aaactttttt

SEQ ID NO: 183496 - DNA, 10 bp, Unknown
  misc_feature (1)..( 10): Result.005 file - promoters50/3435469
aaagttttga

SEQ ID NO: 183497 - DNA, 10 bp, Unknown
  misc_feature (1)..( 10): Result.005 file - promoters50/3435469
aaaatatcaa

SEQ ID NO: 183498 - DNA, 9 bp, Unknown
  misc_feature (1)..( 9): Result.005 file - promoters50/3435469
tttttctta

SEQ ID NO: 183499 - DNA, 9 bp, Unknown
  misc_feature (1)..( 9): Result.005 file - promoters50/3435469
cttttcttt

SEQ ID NO: 183500 - DNA, 9 bp, Unknown
  misc_feature (1)..( 9): Result.005 file - promoters50/3435469
aatttatta

SEQ ID NO: 183501 - DNA, 9 bp, Unknown
  misc_feature (1)..( 9): Result.005 file - promoters50/3435469
tttttctaa

SEQ ID NO: 183502 - DNA, 9 bp, Unknown
  misc_feature (1)..( 9): Result.005 file - promoters50/3435469
cttttttta

SEQ ID NO: 183503 - DNA, 9 bp, Unknown
  misc_feature (1)..( 9): Result.005 file - promoters50/3435469
catttatat

SEQ ID NO: 183504 - DNA, 9 bp, Unknown
  misc_feature (1)..( 9): Result.005 file - promoters50/3435469
tttttagtc

SEQ ID NO: 183505 - DNA, 11 bp, Unknown
  misc_feature (1)..( 11): Result.005 file - promoters50/3435469
ggatttacttg

SEQ ID NO: 183506 - DNA, 11 bp, Unknown
  misc_feature (1)..( 11): Result.005 file - promoters50/3435469
agatatacatt

SEQ ID NO: 183507 - DNA, 11 bp, Unknown
  misc_feature (1)..( 11): Result.005 file - promoters50/3435469
cggttttgata

SEQ ID NO: 183508 - DNA, 11 bp, Unknown
  misc_feature (1)..( 11): Result.005 file - promoters50/3435469
agaaatagaac

SEQ ID NO: 183509 - DNA, 11 bp, Unknown
  misc_feature (1)..( 11): Result.005 file - promoters50/3435469
ttctataaatt

SEQ ID NO: 183510 - DNA, 11 bp, Unknown
  misc_feature (1)..( 11): Result.005 file - promoters50/3435469
agagctaaaaa

SEQ ID NO: 183511 - DNA, 11 bp, Unknown
  misc_feature (1)..( 11): Result.005 file - promoters50/3435469
tgagatgtttg

SEQ ID NO: 183512 - DNA, 11 bp, Unknown
  misc_feature (1)..( 11): Result.005 file - promoters50/3435469
ctagattttta

SEQ ID NO: 183513 - DNA, 11 bp, Unknown
  misc_feature (1)..( 11): Result.005 file - promoters50/3435469
ctagagtttcc

SEQ ID NO: 183514 - DNA, 11 bp, Unknown
  misc_feature (1)..( 11): Result.005 file - promoters50/3435469
aacaatttttc

SEQ ID NO: 183515 - DNA, 11 bp, Unknown
  misc_feature (1)..( 11): Result.005 file - promoters50/3435469
acgttttttta

SEQ ID NO: 183516 - DNA, 11 bp, Unknown
  misc_feature (1)..( 11): Result.005 file - promoters50/3435469
gtagtgttcat

SEQ ID NO: 183517 - DNA, 11 bp, Unknown
  misc_feature (1)..( 11): Result.005 file - promoters50/3435469
ccatatttttt

SEQ ID NO: 183518 - DNA, 11 bp, Unknown
  misc_feature (1)..( 11): Result.005 file - promoters50/3435469
ttttgtttctc

SEQ ID NO: 183519 - DNA, 11 bp, Unknown
  misc_feature (1)..( 11): Result.005 file - promoters50/3435469
gattgttttcg

SEQ ID NO: 183520 - DNA, 11 bp, Unknown
  misc_feature (1)..( 11): Result.005 file - promoters50/3435469
tatttttttct

SEQ ID NO: 183521 - DNA, 11 bp, Unknown
  misc_feature (1)..( 11): Result.005 file - promoters50/3435469
aaatgtttctc

SEQ ID NO: 183522 - DNA, 11 bp, Unknown
  misc_feature (1)..( 11): Result.005 file - promoters50/3435469
aattgtttaag

SEQ ID NO: 183523 - DNA, 11 bp, Unknown
  misc_feature (1)..( 11): Result.005 file - promoters50/3435469
tattttttaaa

SEQ ID NO: 183524 - DNA, 12 bp, Unknown
  misc_feature (1)..( 12): Result.005 file - promoters50/3435469
acaatataaaca

SEQ ID NO: 183525 - DNA, 12 bp, Unknown
  misc_feature (1)..( 12): Result.005 file - promoters50/3435469
ctcatataaata

SEQ ID NO: 183526 - DNA, 12 bp, Unknown
  misc_feature (1)..( 12): Result.005 file - promoters50/3435469
tatatataaaga

SEQ ID NO: 183527 - DNA, 12 bp, Unknown
  misc_feature (1)..( 12): Result.005 file - promoters50/3435469
catatatataca

SEQ ID NO: 183528 - DNA, 12 bp, Unknown
  misc_feature (1)..( 12): Result.005 file - promoters50/3435469
ctcatatatatc

SEQ ID NO: 183529 - DNA, 12 bp, Unknown
  misc_feature (1)..( 12): Result.005 file - promoters50/3435469
tttatttaacgg

SEQ ID NO: 183530 - DNA, 11 bp, Unknown
  misc_feature (1)..( 11): Result.005 file - promoters50/3435469
tgacttgtttt

SEQ ID NO: 183531 - DNA, 11 bp, Unknown
  misc_feature (1)..( 11): Result.005 file - promoters50/3435469
ctacttgtata

SEQ ID NO: 183532 - DNA, 11 bp, Unknown
  misc_feature (1)..( 11): Result.005 file - promoters50/3435469
aaacttttttt

SEQ ID NO: 183533 - DNA, 11 bp, Unknown
  misc_feature (1)..( 11): Result.005 file - promoters50/3435469
aaagttttgag

SEQ ID NO: 183534 - DNA, 11 bp, Unknown
  misc_feature (1)..( 11): Result.005 file - promoters50/3435469
taacttgaata

SEQ ID NO: 183535 - DNA, 11 bp, Unknown
  misc_feature (1)..( 11): Result.005 file - promoters50/3435469
caaattttttt

SEQ ID NO: 183536 - DNA, 11 bp, Unknown
  misc_feature (1)..( 11): Result.005 file - promoters50/3435514
gaaataaaaat

SEQ ID NO: 183537 - DNA, 11 bp, Unknown
  misc_feature (1)..( 11): Result.005 file - promoters50/3435514
gaaaaaaaaaa

SEQ ID NO: 183538 - DNA, 11 bp, Unknown
  misc_feature (1)..( 11): Result.005 file - promoters50/3435514
catatcaaatt

SEQ ID NO: 183539 - DNA, 11 bp, Unknown
  misc_feature (1)..( 11): Result.005 file - promoters50/3435514
tcaatcaaatt

SEQ ID NO: 183540 - DNA, 11 bp, Unknown
  misc_feature (1)..( 11): Result.005 file - promoters50/3435514
tcaatcaatca

SEQ ID NO: 183541 - DNA, 10 bp, Unknown
  misc_feature (1)..( 10): Result.005 file - promoters50/3435514
tttattttct

SEQ ID NO: 183542 - DNA, 10 bp, Unknown
  misc_feature (1)..( 10): Result.005 file - promoters50/3435514
tttctttgct

SEQ ID NO: 183543 - DNA, 10 bp, Unknown
  misc_feature (1)..( 10): Result.005 file - promoters50/3435514
tttgttttct

SEQ ID NO: 183544 - DNA, 10 bp, Unknown
  misc_feature (1)..( 10): Result.005 file - promoters50/3435514
tttttttaaa

SEQ ID NO: 183545 - DNA, 10 bp, Unknown
  misc_feature (1)..( 10): Result.005 file - promoters50/3435514
catctttgtg

SEQ ID NO: 183546 - DNA, 13 bp, Unknown
  misc_feature (1)..( 13): Result.005 file - promoters50/3435514
gtctattttgtca

SEQ ID NO: 183547 - DNA, 13 bp, Unknown
  misc_feature (1)..( 13): Result.005 file - promoters50/3435514
gatggttttgtac

SEQ ID NO: 183548 - DNA, 13 bp, Unknown
  misc_feature (1)..( 13): Result.005 file - promoters50/3435514
aaaaattgtgtca

SEQ ID NO: 183549 - DNA, 13 bp, Unknown
  misc_feature (1)..( 13): Result.005 file - promoters50/3435514
gtcaatttagtcc

SEQ ID NO: 183550 - DNA, 13 bp, Unknown
  misc_feature (1)..( 13): Result.005 file - promoters50/3435514
aacaatttgactg

SEQ ID NO: 183551 - DNA, 9 bp, Unknown
  misc_feature (1)..( 9): Result.005 file - promoters50/3435518
ttgaggatc

SEQ ID NO: 183552 - DNA, 9 bp, Unknown
  misc_feature (1)..( 9): Result.005 file - promoters50/3435518
aagaggatc

SEQ ID NO: 183553 - DNA, 9 bp, Unknown
  misc_feature (1)..( 9): Result.005 file - promoters50/3435518
aagtggatt

SEQ ID NO: 183554 - DNA, 8 bp, Unknown
  misc_feature (1)..( 8): Result.005 file - promoters50/3435518
ttgctgac

SEQ ID NO: 183555 - DNA, 8 bp, Unknown
  misc_feature (1)..( 8): Result.005 file - promoters50/3435518
ttgctgat

SEQ ID NO: 183556 - DNA, 8 bp, Unknown
  misc_feature (1)..( 8): Result.005 file - promoters50/3435518
tagctgac

SEQ ID NO: 183557 - DNA, 10 bp, Unknown
  misc_feature (1)..( 10): Result.005 file - promoters50/3435518
gtaggcagta

SEQ ID NO: 183558 - DNA, 10 bp, Unknown
  misc_feature (1)..( 10): Result.005 file - promoters50/3435518
agaggaagta

SEQ ID NO: 183559 - DNA, 10 bp, Unknown
  misc_feature (1)..( 10): Result.005 file - promoters50/3435518
agacgaacac

SEQ ID NO: 183560 - DNA, 9 bp, Unknown
  misc_feature (1)..( 9): Result.005 file - promoters50/3435534
tttcgtttt

SEQ ID NO: 183561 - DNA, 9 bp, Unknown
  misc_feature (1)..( 9): Result.005 file - promoters50/3435534
aaacgtttt

SEQ ID NO: 183562 - DNA, 9 bp, Unknown
  misc_feature (1)..( 9): Result.005 file - promoters50/3435534
gttcttttt

SEQ ID NO: 183563 - DNA, 9 bp, Unknown
  misc_feature (1)..( 9): Result.005 file - promoters50/3435534
ttacttttt

SEQ ID NO: 183564 - DNA, 9 bp, Unknown
  misc_feature (1)..( 9): Result.005 file - promoters50/3435534
tttcttttg

SEQ ID NO: 183565 - DNA, 9 bp, Unknown
  misc_feature (1)..( 9): Result.005 file - promoters50/3435534
ttacatttg

SEQ ID NO: 183566 - DNA, 6 bp, Unknown
  misc_feature (1)..( 6): Result.005 file - promoters50/3435578
tatcaa

SEQ ID NO: 183567 - DNA, 6 bp, Unknown
  misc_feature (1)..( 6): Result.005 file - promoters50/3435578
tatcaa

SEQ ID NO: 183568 - DNA, 6 bp, Unknown
  misc_feature (1)..( 6): Result.005 file - promoters50/3435578
tatcaa

SEQ ID NO: 183569 - DNA, 12 bp, Unknown
  misc_feature (1)..( 12): Result.005 file - promoters50/3435578
aaaacatttgac

SEQ ID NO: 183570 - DNA, 12 bp, Unknown
  misc_feature (1)..( 12): Result.005 file - promoters50/3435578
tgcacattcgac

SEQ ID NO: 183571 - DNA, 12 bp, Unknown
  misc_feature (1)..( 12): Result.005 file - promoters50/3435578
ttgaaattacca

SEQ ID NO: 183572 - DNA, 8 bp, Unknown
  misc_feature (1)..( 8): Result.005 file - promoters50/3435578
ttcacaca

SEQ ID NO: 183573 - DNA, 8 bp, Unknown
  misc_feature (1)..( 8): Result.005 file - promoters50/3435578
ttcacaaa

SEQ ID NO: 183574 - DNA, 8 bp, Unknown
  misc_feature (1)..( 8): Result.005 file - promoters50/3435578
ttcaaaaa

SEQ ID NO: 183575 - DNA, 10 bp, Unknown
  misc_feature (1)..( 10): Result.005 file - promoters50/3435578
cacacacact

SEQ ID NO: 183576 - DNA, 10 bp, Unknown
  misc_feature (1)..( 10): Result.005 file - promoters50/3435578
ttcacaaact

SEQ ID NO: 183577 - DNA, 10 bp, Unknown
  misc_feature (1)..( 10): Result.005 file - promoters50/3435578
ttcaaaaaat

SEQ ID NO: 183578 - DNA, 10 bp, Unknown
  misc_feature (1)..( 10): Result.005 file - promoters50/3435605
tgtattctaa

SEQ ID NO: 183579 - DNA, 10 bp, Unknown
  misc_feature (1)..( 10): Result.005 file - promoters50/3435605
tttattctat

SEQ ID NO: 183580 - DNA, 10 bp, Unknown
  misc_feature (1)..( 10): Result.005 file - promoters50/3435605
tttcttcatc

SEQ ID NO: 183581 - DNA, 10 bp, Unknown
  misc_feature (1)..( 10): Result.005 file - promoters50/3435605
attaatctca

SEQ ID NO: 183582 - DNA, 10 bp, Unknown
  misc_feature (1)..( 10): Result.005 file - promoters50/3435605
taaaatatca

SEQ ID NO: 183583 - DNA, 10 bp, Unknown
  misc_feature (1)..( 10): Result.005 file - promoters50/3435605
tagtatatca

SEQ ID NO: 183584 - DNA, 10 bp, Unknown
  misc_feature (1)..( 10): Result.005 file - promoters50/3435605
tccaaaaaag

SEQ ID NO: 183585 - DNA, 10 bp, Unknown
  misc_feature (1)..( 10): Result.005 file - promoters50/3435605
atcaaaaata

SEQ ID NO: 183586 - DNA, 10 bp, Unknown
  misc_feature (1)..( 10): Result.005 file - promoters50/3435605
aataaaaaac

SEQ ID NO: 183587 - DNA, 10 bp, Unknown
  misc_feature (1)..( 10): Result.005 file - promoters50/3435605
tggaaacact

SEQ ID NO: 183588 - DNA, 10 bp, Unknown
  misc_feature (1)..( 10): Result.005 file - promoters50/3435605
atcaaaatta

SEQ ID NO: 183589 - DNA, 10 bp, Unknown
  misc_feature (1)..( 10): Result.005 file - promoters50/3435605
atcaaaccga

SEQ ID NO: 183590 - DNA, 12 bp, Unknown
  misc_feature (1)..( 12): Result.005 file - promoters50/3435605
cctttattaaat

SEQ ID NO: 183591 - DNA, 12 bp, Unknown
  misc_feature (1)..( 12): Result.005 file - promoters50/3435605
tatttatttcct

SEQ ID NO: 183592 - DNA, 12 bp, Unknown
  misc_feature (1)..( 12): Result.005 file - promoters50/3435605
agtttattggaa

SEQ ID NO: 183593 - DNA, 12 bp, Unknown
  misc_feature (1)..( 12): Result.005 file - promoters50/3435605
acattataaaat

SEQ ID NO: 183594 - DNA, 12 bp, Unknown
  misc_feature (1)..( 12): Result.005 file - promoters50/3435605
aaggtatcaaac

SEQ ID NO: 183595 - DNA, 12 bp, Unknown
  misc_feature (1)..( 12): Result.005 file - promoters50/3435605
aaaatatcaata

SEQ ID NO: 183596 - DNA, 12 bp, Unknown
  misc_feature (1)..( 12): Result.005 file - promoters50/3435605
acattaaaaaaa

SEQ ID NO: 183597 - DNA, 9 bp, Unknown
  misc_feature (1)..( 9): Result.005 file - promoters50/3435605
ttattaaat

SEQ ID NO: 183598 - DNA, 9 bp, Unknown
  misc_feature (1)..( 9): Result.005 file - promoters50/3435605
gtatcaaac

SEQ ID NO: 183599 - DNA, 9 bp, Unknown
  misc_feature (1)..( 9): Result.005 file - promoters50/3435605
acattaaaa

SEQ ID NO: 183600 - DNA, 9 bp, Unknown
  misc_feature (1)..( 9): Result.005 file - promoters50/3435605
ttataaaat

SEQ ID NO: 183601 - DNA, 9 bp, Unknown
  misc_feature (1)..( 9): Result.005 file - promoters50/3435605
ttataatca

SEQ ID NO: 183602 - DNA, 9 bp, Unknown
  misc_feature (1)..( 9): Result.005 file - promoters50/3435605
atatcaata

SEQ ID NO: 183603 - DNA, 14 bp, Unknown
  misc_feature (1)..( 14): Result.005 file - promoters50/3435632
aaaattactcttaa

SEQ ID NO: 183604 - DNA, 14 bp, Unknown
  misc_feature (1)..( 14): Result.005 file - promoters50/3435632
taaactacacatag

SEQ ID NO: 183605 - DNA, 14 bp, Unknown
  misc_feature (1)..( 14): Result.005 file - promoters50/3435632
aaaaatactttgca

SEQ ID NO: 183606 - DNA, 14 bp, Unknown
  misc_feature (1)..( 14): Result.005 file - promoters50/3435632
aataataaaacatt

SEQ ID NO: 183607 - DNA, 14 bp, Unknown
  misc_feature (1)..( 14): Result.005 file - promoters50/3435632
gaaaatacccggag

SEQ ID NO: 183608 - DNA, 14 bp, Unknown
  misc_feature (1)..( 14): Result.005 file - promoters50/3435632
ttcactagacatgt

SEQ ID NO: 183609 - DNA, 12 bp, Unknown
  misc_feature (1)..( 12): Result.005 file - promoters50/3435632
taacaaaaaatt

SEQ ID NO: 183610 - DNA, 12 bp, Unknown
  misc_feature (1)..( 12): Result.005 file - promoters50/3435632
aaaataaaaatg

SEQ ID NO: 183611 - DNA, 13 bp, Unknown
  misc_feature (1)..( 13): Result.005 file - promoters50/3435632
ataataaaacatt

SEQ ID NO: 183612 - DNA, 13 bp, Unknown
  misc_feature (1)..( 13): Result.005 file - promoters50/3435632
tggataaaatttt

SEQ ID NO: 183613 - DNA, 13 bp, Unknown
  misc_feature (1)..( 13): Result.005 file - promoters50/3435632
attataatatttc

SEQ ID NO: 183614 - DNA, 13 bp, Unknown
  misc_feature (1)..( 13): Result.005 file - promoters50/3435632
aaggtaaaccatg

SEQ ID NO: 183615 - DNA, 13 bp, Unknown
  misc_feature (1)..( 13): Result.005 file - promoters50/3435632
ataacaaaaaatt

SEQ ID NO: 183616 - DNA, 13 bp, Unknown
  misc_feature (1)..( 13): Result.005 file - promoters50/3435632
acctcaaaaatga

SEQ ID NO: 183617 - DNA, 13 bp, Unknown
  misc_feature (1)..( 13): Result.005 file - promoters50/3435632
ataataaaacatt

SEQ ID NO: 183618 - DNA, 13 bp, Unknown
  misc_feature (1)..( 13): Result.005 file - promoters50/3435632
atggataaacatg

SEQ ID NO: 183619 - DNA, 13 bp, Unknown
  misc_feature (1)..( 13): Result.005 file - promoters50/3435632
tggataaaatttt

SEQ ID NO: 183620 - DNA, 13 bp, Unknown
  misc_feature (1)..( 13): Result.005 file - promoters50/3435632
attataatatttc

SEQ ID NO: 183621 - DNA, 13 bp, Unknown
  misc_feature (1)..( 13): Result.005 file - promoters50/3435632
aaggtaaaccatg

SEQ ID NO: 183622 - DNA, 7 bp, Unknown
  misc_feature (1)..( 7): Result.005 file - promoters50/3435723
aaacagt

SEQ ID NO: 183623 - DNA, 7 bp, Unknown
  misc_feature (1)..( 7): Result.005 file - promoters50/3435723
aaacaga

SEQ ID NO: 183624 - DNA, 7 bp, Unknown
  misc_feature (1)..( 7): Result.005 file - promoters50/3435723
aaagaga

SEQ ID NO: 183625 - DNA, 12 bp, Unknown
  misc_feature (1)..( 12): Result.005 file - promoters50/3435761
tttgattttttc

SEQ ID NO: 183626 - DNA, 12 bp, Unknown
  misc_feature (1)..( 12): Result.005 file - promoters50/3435761
gatgatttgagg

SEQ ID NO: 183627 - DNA, 12 bp, Unknown
  misc_feature (1)..( 12): Result.005 file - promoters50/3435761
tttcattttatt

SEQ ID NO: 183628 - DNA, 13 bp, Unknown
  misc_feature (1)..( 13): Result.005 file - promoters50/3435761
cgtgagttttttt

SEQ ID NO: 183629 - DNA, 13 bp, Unknown
  misc_feature (1)..( 13): Result.005 file - promoters50/3435761
aaaccattttggg

SEQ ID NO: 183630 - DNA, 13 bp, Unknown
  misc_feature (1)..( 13): Result.005 file - promoters50/3435761
gcactatttcaaa

SEQ ID NO: 183631 - DNA, 10 bp, Unknown
  misc_feature (1)..( 10): Result.005 file - promoters50/3435761
ttctttggat

SEQ ID NO: 183632 - DNA, 10 bp, Unknown
  misc_feature (1)..( 10): Result.005 file - promoters50/3435761
gggtttcgat

SEQ ID NO: 183633 - DNA, 10 bp, Unknown
  misc_feature (1)..( 10): Result.005 file - promoters50/3435761
atctttagat

SEQ ID NO: 183634 - DNA, 10 bp, Unknown
  misc_feature (1)..( 10): Result.005 file - promoters50/3435761
agagttggat

SEQ ID NO: 183635 - DNA, 10 bp, Unknown
  misc_feature (1)..( 10): Result.005 file - promoters50/3435761
accgttggat

SEQ ID NO: 183636 - DNA, 10 bp, Unknown
  misc_feature (1)..( 10): Result.005 file - promoters50/3435761
atcttcagac

SEQ ID NO: 183637 - DNA, 11 bp, Unknown
  misc_feature (1)..( 11): Result.005 file - promoters50/3435765
ccattttaaac

SEQ ID NO: 183638 - DNA, 11 bp, Unknown
  misc_feature (1)..( 11): Result.005 file - promoters50/3435765
ccatttagttt

SEQ ID NO: 183639 - DNA, 11 bp, Unknown
  misc_feature (1)..( 11): Result.005 file - promoters50/3435765
ccatttaattt

SEQ ID NO: 183640 - DNA, 11 bp, Unknown
  misc_feature (1)..( 11): Result.005 file - promoters50/3435765
tcatttgaaac

SEQ ID NO: 183641 - DNA, 11 bp, Unknown
  misc_feature (1)..( 11): Result.005 file - promoters50/3435765
tgtttttaaat

SEQ ID NO: 183642 - DNA, 11 bp, Unknown
  misc_feature (1)..( 11): Result.005 file - promoters50/3435765
gcatataatta

SEQ ID NO: 183643 - DNA, 9 bp, Unknown
  misc_feature (1)..( 9): Result.005 file - promoters50/3435765
gttttataa

SEQ ID NO: 183644 - DNA, 9 bp, Unknown
  misc_feature (1)..( 9): Result.005 file - promoters50/3435765
tttttatga

SEQ ID NO: 183645 - DNA, 9 bp, Unknown
  misc_feature (1)..( 9): Result.005 file - promoters50/3435765
tttttaaat

SEQ ID NO: 183646 - DNA, 9 bp, Unknown
  misc_feature (1)..( 9): Result.005 file - promoters50/3435765
gttttatga

SEQ ID NO: 183647 - DNA, 9 bp, Unknown
  misc_feature (1)..( 9): Result.005 file - promoters50/3435765
ctttaatga

SEQ ID NO: 183648 - DNA, 9 bp, Unknown
  misc_feature (1)..( 9): Result.005 file - promoters50/3435765
atttaattt

SEQ ID NO: 183649 - DNA, 10 bp, Unknown
  misc_feature (1)..( 10): Result.005 file - promoters50/3435765
ataaaataaa

SEQ ID NO: 183650 - DNA, 10 bp, Unknown
  misc_feature (1)..( 10): Result.005 file - promoters50/3435765
atacaataat

SEQ ID NO: 183651 - DNA, 10 bp, Unknown
  misc_feature (1)..( 10): Result.005 file - promoters50/3435765
atataattaa

SEQ ID NO: 183652 - DNA, 10 bp, Unknown
  misc_feature (1)..( 10): Result.005 file - promoters50/3435765
ataacataga

SEQ ID NO: 183653 - DNA, 10 bp, Unknown
  misc_feature (1)..( 10): Result.005 file - promoters50/3435765
aggaaataaa

SEQ ID NO: 183654 - DNA, 10 bp, Unknown
  misc_feature (1)..( 10): Result.005 file - promoters50/3435765
ataaaataaa

SEQ ID NO: 183655 - DNA, 10 bp, Unknown
  misc_feature (1)..( 10): Result.005 file - promoters50/3435765
atataattaa

SEQ ID NO: 183656 - DNA, 10 bp, Unknown
  misc_feature (1)..( 10): Result.005 file - promoters50/3435765
ataacataga

SEQ ID NO: 183657 - DNA, 10 bp, Unknown
  misc_feature (1)..( 10): Result.005 file - promoters50/3435765
ttatgattaa

SEQ ID NO: 183658 - DNA, 10 bp, Unknown
  misc_feature (1)..( 10): Result.005 file - promoters50/3435765
gtaacttagg

SEQ ID NO: 183659 - DNA, 8 bp, Unknown
  misc_feature (1)..( 8): Result.005 file - promoters50/3435765
tatagttt

SEQ ID NO: 183660 - DNA, 8 bp, Unknown
  misc_feature (1)..( 8): Result.005 file - promoters50/3435765
aataattt

SEQ ID NO: 183661 - DNA, 8 bp, Unknown
  misc_feature (1)..( 8): Result.005 file - promoters50/3435765
aataatta

SEQ ID NO: 183662 - DNA, 8 bp, Unknown
  misc_feature (1)..( 8): Result.005 file - promoters50/3435765
tatactta

SEQ ID NO: 183663 - DNA, 8 bp, Unknown
  misc_feature (1)..( 8): Result.005 file - promoters50/3435765
gacagtaa

SEQ ID NO: 183664 - DNA, 9 bp, Unknown
  misc_feature (1)..( 9): Result.005 file - promoters50/3435765
ttttatgat

SEQ ID NO: 183665 - DNA, 9 bp, Unknown
  misc_feature (1)..( 9): Result.005 file - promoters50/3435765
aattatgat

SEQ ID NO: 183666 - DNA, 9 bp, Unknown
  misc_feature (1)..( 9): Result.005 file - promoters50/3435765
ttttatgaa

SEQ ID NO: 183667 - DNA, 9 bp, Unknown
  misc_feature (1)..( 9): Result.005 file - promoters50/3435765
tttaatgaa

SEQ ID NO: 183668 - DNA, 9 bp, Unknown
  misc_feature (1)..( 9): Result.005 file - promoters50/3435765
tttaatttt

SEQ ID NO: 183669 - DNA, 9 bp, Unknown
  misc_feature (1)..( 9): Result.005 file - promoters50/3435803
gtttttctg

SEQ ID NO: 183670 - DNA, 9 bp, Unknown
  misc_feature (1)..( 9): Result.005 file - promoters50/3435803
ttttgtcta

SEQ ID NO: 183671 - DNA, 10 bp, Unknown
  misc_feature (1)..( 10): Result.005 file - promoters50/3435803
ttattttctg

SEQ ID NO: 183672 - DNA, 9 bp, Unknown
  misc_feature (1)..( 9): Result.005 file - promoters50/3435803
atttgtcgt

SEQ ID NO: 183673 - DNA, 10 bp, Unknown
  misc_feature (1)..( 10): Result.005 file - promoters50/3435803
gttctgtttc

SEQ ID NO: 183674 - DNA, 12 bp, Unknown
  misc_feature (1)..( 12): Result.005 file - promoters50/3435833
ataaaagtttgt

SEQ ID NO: 183675 - DNA, 12 bp, Unknown
  misc_feature (1)..( 12): Result.005 file - promoters50/3435833
ttcaaactttca

SEQ ID NO: 183676 - DNA, 12 bp, Unknown
  misc_feature (1)..( 12): Result.005 file - promoters50/3435833
agaaaagtaaga

SEQ ID NO: 183677 - DNA, 12 bp, Unknown
  misc_feature (1)..( 12): Result.005 file - promoters50/3435833
ctcacactaaac

SEQ ID NO: 183678 - DNA, 12 bp, Unknown
  misc_feature (1)..( 12): Result.005 file - promoters50/3435833
agaaaaataacc

SEQ ID NO: 183679 - DNA, 12 bp, Unknown
  misc_feature (1)..( 12): Result.005 file - promoters50/3435833
aataaattaatc

SEQ ID NO: 183680 - DNA, 12 bp, Unknown
  misc_feature (1)..( 12): Result.005 file - promoters50/3435833
acgagattcatc

SEQ ID NO: 183681 - DNA, 14 bp, Unknown
  misc_feature (1)..( 14): Result.005 file - promoters50/3435833
ataataaaagtttg

SEQ ID NO: 183682 - DNA, 14 bp, Unknown
  misc_feature (1)..( 14): Result.005 file - promoters50/3435833
ttaagaaaaataac

SEQ ID NO: 183683 - DNA, 14 bp, Unknown
  misc_feature (1)..( 14): Result.005 file - promoters50/3435833
ttacgaaacgtcac

SEQ ID NO: 183684 - DNA, 14 bp, Unknown
  misc_feature (1)..( 14): Result.005 file - promoters50/3435833
ttgagaaaagtaag

SEQ ID NO: 183685 - DNA, 14 bp, Unknown
  misc_feature (1)..( 14): Result.005 file - promoters50/3435833
taaataaattaatc

SEQ ID NO: 183686 - DNA, 14 bp, Unknown
  misc_feature (1)..( 14): Result.005 file - promoters50/3435833
tgacgagattcatc

SEQ ID NO: 183687 - DNA, 20 bp, Unknown
  misc_feature (1)..( 20): Result.005 file - promoters50/3435833
atttagtgggcttaaagtgt

SEQ ID NO: 183688 - DNA, 20 bp, Unknown
  misc_feature (1)..( 20): Result.005 file - promoters50/3435833
tatacttgggcctaaatact

SEQ ID NO: 183689 - DNA, 20 bp, Unknown
  misc_feature (1)..( 20): Result.005 file - promoters50/3435833
ttttggtgagcttaatggcc

SEQ ID NO: 183690 - DNA, 20 bp, Unknown
  misc_feature (1)..( 20): Result.005 file - promoters50/3435833
catttacaagcccaaagaat

SEQ ID NO: 183691 - DNA, 20 bp, Unknown
  misc_feature (1)..( 20): Result.005 file - promoters50/3435833
ttttggatttaacaaaagtt

SEQ ID NO: 183692 - DNA, 20 bp, Unknown
  misc_feature (1)..( 20): Result.005 file - promoters50/3435833
gattaataagggtatatttg

SEQ ID NO: 183693 - DNA, 10 bp, Unknown
  misc_feature (1)..( 10): Result.005 file - promoters50/3435891
tgttttcact

SEQ ID NO: 183694 - DNA, 10 bp, Unknown
  misc_feature (1)..( 10): Result.005 file - promoters50/3435891
taattttact

SEQ ID NO: 183695 - DNA, 10 bp, Unknown
  misc_feature (1)..( 10): Result.005 file - promoters50/3435891
tgtattcacc

SEQ ID NO: 183696 - DNA, 9 bp, Unknown
  misc_feature (1)..( 9): Result.005 file - promoters50/3435891
aactcttta

SEQ ID NO: 183697 - DNA, 9 bp, Unknown
  misc_feature (1)..( 9): Result.005 file - promoters50/3435891
aactttttt

SEQ ID NO: 183698 - DNA, 10 bp, Unknown
  misc_feature (1)..( 10): Result.005 file - promoters50/3435891
tgttttatta

SEQ ID NO: 183699 - DNA, 7 bp, Unknown
  misc_feature (1)..( 7): Result.005 file - promoters50/3435891
acaaaaa

SEQ ID NO: 183700 - DNA, 7 bp, Unknown
  misc_feature (1)..( 7): Result.005 file - promoters50/3435891
tcaaaaa

SEQ ID NO: 183701 - DNA, 7 bp, Unknown
  misc_feature (1)..( 7): Result.005 file - promoters50/3435891
acaaaaa

SEQ ID NO: 183702 - DNA, 7 bp, Unknown
  misc_feature (1)..( 7): Result.005 file - promoters50/3435891
tttattg

SEQ ID NO: 183703 - DNA, 7 bp, Unknown
  misc_feature (1)..( 7): Result.005 file - promoters50/3435891
tttatta

SEQ ID NO: 183704 - DNA, 7 bp, Unknown
  misc_feature (1)..( 7): Result.005 file - promoters50/3435891
tttttta

SEQ ID NO: 183705 - DNA, 9 bp, Unknown
  misc_feature (1)..( 9): Result.005 file - promoters50/3435891
ttgtctaag

SEQ ID NO: 183706 - DNA, 9 bp, Unknown
  misc_feature (1)..( 9): Result.005 file - promoters50/3435891
ctgtcaaag

SEQ ID NO: 183707 - DNA, 9 bp, Unknown
  misc_feature (1)..( 9): Result.005 file - promoters50/3435891
ctgtcatta

SEQ ID NO: 183708 - DNA, 7 bp, Unknown
  misc_feature (1)..( 7): Result.005 file - promoters50/3435917
ataaagg

SEQ ID NO: 183709 - DNA, 7 bp, Unknown
  misc_feature (1)..( 7): Result.005 file - promoters50/3435917
ataaagt

SEQ ID NO: 183710 - DNA, 7 bp, Unknown
  misc_feature (1)..( 7): Result.005 file - promoters50/3435917
ataaagt

SEQ ID NO: 183711 - DNA, 7 bp, Unknown
  misc_feature (1)..( 7): Result.005 file - promoters50/3435917
tttataa

SEQ ID NO: 183712 - DNA, 7 bp, Unknown
  misc_feature (1)..( 7): Result.005 file - promoters50/3435917
tttatat

SEQ ID NO: 183713 - DNA, 7 bp, Unknown
  misc_feature (1)..( 7): Result.005 file - promoters50/3435917
tttttaa

SEQ ID NO: 183714 - DNA, 8 bp, Unknown
  misc_feature (1)..( 8): Result.005 file - promoters50/3435917
ataaaata

SEQ ID NO: 183715 - DNA, 8 bp, Unknown
  misc_feature (1)..( 8): Result.005 file - promoters50/3435917
ataaaaaa

SEQ ID NO: 183716 - DNA, 8 bp, Unknown
  misc_feature (1)..( 8): Result.005 file - promoters50/3435917
gtaagata

SEQ ID NO: 183717 - DNA, 8 bp, Unknown
  misc_feature (1)..( 8): Result.005 file - promoters50/3435917
cattgtaa

SEQ ID NO: 183718 - DNA, 8 bp, Unknown
  misc_feature (1)..( 8): Result.005 file - promoters50/3435917
tattttaa

SEQ ID NO: 183719 - DNA, 8 bp, Unknown
  misc_feature (1)..( 8): Result.005 file - promoters50/3435917
tatttttt

SEQ ID NO: 183720 - DNA, 8 bp, Unknown
  misc_feature (1)..( 8): Result.005 file - promoters50/3436121
ttttaaga

SEQ ID NO: 183721 - DNA, 8 bp, Unknown
  misc_feature (1)..( 8): Result.005 file - promoters50/3436121
gtttaagc

SEQ ID NO: 183722 - DNA, 9 bp, Unknown
  misc_feature (1)..( 9): Result.005 file - promoters50/3436121
ttttgaaga

SEQ ID NO: 183723 - DNA, 7 bp, Unknown
  misc_feature (1)..( 7): Result.005 file - promoters50/3436121
aagaaaa

SEQ ID NO: 183724 - DNA, 7 bp, Unknown
  misc_feature (1)..( 7): Result.005 file - promoters50/3436121
aagaaat

SEQ ID NO: 183725 - DNA, 7 bp, Unknown
  misc_feature (1)..( 7): Result.005 file - promoters50/3436121
aagtaat

SEQ ID NO: 183726 - DNA, 8 bp, Unknown
  misc_feature (1)..( 8): Result.005 file - promoters50/3436121
acatgtct

SEQ ID NO: 183727 - DNA, 8 bp, Unknown
  misc_feature (1)..( 8): Result.005 file - promoters50/3436121
ttatgtct

SEQ ID NO: 183728 - DNA, 8 bp, Unknown
  misc_feature (1)..( 8): Result.005 file - promoters50/3436121
ttatgtca

SEQ ID NO: 183729 - DNA, 7 bp, Unknown
  misc_feature (1)..( 7): Result.005 file - promoters50/3436121
gatcgaa

SEQ ID NO: 183730 - DNA, 7 bp, Unknown
  misc_feature (1)..( 7): Result.005 file - promoters50/3436121
gatcgat

SEQ ID NO: 183731 - DNA, 7 bp, Unknown
  misc_feature (1)..( 7): Result.005 file - promoters50/3436121
gatggat

SEQ ID NO: 183732 - DNA, 7 bp, Unknown
  misc_feature (1)..( 7): Result.005 file - promoters50/3436139
attaata

SEQ ID NO: 183733 - DNA, 7 bp, Unknown
  misc_feature (1)..( 7): Result.005 file - promoters50/3436139
gttaata

SEQ ID NO: 183734 - DNA, 7 bp, Unknown
  misc_feature (1)..( 7): Result.005 file - promoters50/3436139
atttata

SEQ ID NO: 183735 - DNA, 7 bp, Unknown
  misc_feature (1)..( 7): Result.005 file - promoters50/3436222
aaaaata

SEQ ID NO: 183736 - DNA, 7 bp, Unknown
  misc_feature (1)..( 7): Result.005 file - promoters50/3436222
aaaaatc

SEQ ID NO: 183737 - DNA, 7 bp, Unknown
  misc_feature (1)..( 7): Result.005 file - promoters50/3436222
taaaata

SEQ ID NO: 183738 - DNA, 10 bp, Unknown
  misc_feature (1)..( 10): Result.005 file - promoters50/3436222
atcaaaaatg

SEQ ID NO: 183739 - DNA, 10 bp, Unknown
  misc_feature (1)..( 10): Result.005 file - promoters50/3436222
atcagaaatt

SEQ ID NO: 183740 - DNA, 10 bp, Unknown
  misc_feature (1)..( 10): Result.005 file - promoters50/3436222
atttaaaatg

SEQ ID NO: 183741 - DNA, 9 bp, Unknown
  misc_feature (1)..( 9): Result.005 file - promoters50/3436222
gacaaaaat

SEQ ID NO: 183742 - DNA, 9 bp, Unknown
  misc_feature (1)..( 9): Result.005 file - promoters50/3436222
gacagaaac

SEQ ID NO: 183743 - DNA, 9 bp, Unknown
  misc_feature (1)..( 9): Result.005 file - promoters50/3436222
ttgaaaaat

SEQ ID NO: 183744 - DNA, 10 bp, Unknown
  misc_feature (1)..( 10): Result.005 file - promoters50/3436222
atataatatt

SEQ ID NO: 183745 - DNA, 10 bp, Unknown
  misc_feature (1)..( 10): Result.005 file - promoters50/3436222
atataaacat

SEQ ID NO: 183746 - DNA, 10 bp, Unknown
  misc_feature (1)..( 10): Result.005 file - promoters50/3436222
atataaaata

SEQ ID NO: 183747 - DNA, 8 bp, Unknown
  misc_feature (1)..( 8): Result.005 file - promoters50/3436265
gaaagttt

SEQ ID NO: 183748 - DNA, 8 bp, Unknown
  misc_feature (1)..( 8): Result.005 file - promoters50/3436265
caaacttt

SEQ ID NO: 183749 - DNA, 8 bp, Unknown
  misc_feature (1)..( 8): Result.005 file - promoters50/3436265
taaacttc

SEQ ID NO: 183750 - DNA, 8 bp, Unknown
  misc_feature (1)..( 8): Result.005 file - promoters50/3436265
taaacttt

SEQ ID NO: 183751 - DNA, 11 bp, Unknown
  misc_feature (1)..( 11): Result.005 file - promoters50/3436265
ctcaataatat

SEQ ID NO: 183752 - DNA, 11 bp, Unknown
  misc_feature (1)..( 11): Result.005 file - promoters50/3436265
attaataatgt

SEQ ID NO: 183753 - DNA, 11 bp, Unknown
  misc_feature (1)..( 11): Result.005 file - promoters50/3436265
tattatagtat

SEQ ID NO: 183754 - DNA, 11 bp, Unknown
  misc_feature (1)..( 11): Result.005 file - promoters50/3436265
atttataaatc

SEQ ID NO: 183755 - DNA, 9 bp, Unknown
  misc_feature (1)..( 9): Result.005 file - promoters50/3436265
cttctttgt

SEQ ID NO: 183756 - DNA, 9 bp, Unknown
  misc_feature (1)..( 9): Result.005 file - promoters50/3436265
attctatgt

SEQ ID NO: 183757 - DNA, 9 bp, Unknown
  misc_feature (1)..( 9): Result.005 file - promoters50/3436265
cttttttaa

SEQ ID NO: 183758 - DNA, 9 bp, Unknown
  misc_feature (1)..( 9): Result.005 file - promoters50/3436265
gttttttat

SEQ ID NO: 183759 - DNA, 9 bp, Unknown
  misc_feature (1)..( 9): Result.005 file - promoters50/3436265
cttaagtag

SEQ ID NO: 183760 - DNA, 9 bp, Unknown
  misc_feature (1)..( 9): Result.005 file - promoters50/3436265
attatgtat

SEQ ID NO: 183761 - DNA, 9 bp, Unknown
  misc_feature (1)..( 9): Result.005 file - promoters50/3436265
attttgtta

SEQ ID NO: 183762 - DNA, 9 bp, Unknown
  misc_feature (1)..( 9): Result.005 file - promoters50/3436265
tatatatat

SEQ ID NO: 183763 - DNA, 12 bp, Unknown
  misc_feature (1)..( 12): Result.005 file - promoters50/3436267
cattataacctc

SEQ ID NO: 183764 - DNA, 12 bp, Unknown
  misc_feature (1)..( 12): Result.005 file - promoters50/3436267
tattattacctc

SEQ ID NO: 183765 - DNA, 12 bp, Unknown
  misc_feature (1)..( 12): Result.005 file - promoters50/3436267
cattattgatcc

SEQ ID NO: 183766 - DNA, 12 bp, Unknown
  misc_feature (1)..( 12): Result.005 file - promoters50/3436267
gattttaagaca

SEQ ID NO: 183767 - DNA, 12 bp, Unknown
  misc_feature (1)..( 12): Result.005 file - promoters50/3436267
tattataaaact

SEQ ID NO: 183768 - DNA, 12 bp, Unknown
  misc_feature (1)..( 12): Result.005 file - promoters50/3436267
cattgttgttgc

SEQ ID NO: 183769 - DNA, 10 bp, Unknown
  misc_feature (1)..( 10): Result.005 file - promoters50/3436312
ctatgctata

SEQ ID NO: 183770 - DNA, 10 bp, Unknown
  misc_feature (1)..( 10): Result.005 file - promoters50/3436312
ttttgctatg

SEQ ID NO: 183771 - DNA, 10 bp, Unknown
  misc_feature (1)..( 10): Result.005 file - promoters50/3436312
ttttgttatg

SEQ ID NO: 183772 - DNA, 10 bp, Unknown
  misc_feature (1)..( 10): Result.005 file - promoters50/3436319
cctatttata

SEQ ID NO: 183773 - DNA, 10 bp, Unknown
  misc_feature (1)..( 10): Result.005 file - promoters50/3436319
tatatctata

SEQ ID NO: 183774 - DNA, 10 bp, Unknown
  misc_feature (1)..( 10): Result.005 file - promoters50/3436319
cctaattatt

SEQ ID NO: 183775 - DNA, 8 bp, Unknown
  misc_feature (1)..( 8): Result.005 file - promoters50/3436319
actgttaa

SEQ ID NO: 183776 - DNA, 8 bp, Unknown
  misc_feature (1)..( 8): Result.005 file - promoters50/3436319
acttttaa

SEQ ID NO: 183777 - DNA, 8 bp, Unknown
  misc_feature (1)..( 8): Result.005 file - promoters50/3436319
ttttttaa

SEQ ID NO: 183778 - DNA, 7 bp, Unknown
  misc_feature (1)..( 7): Result.005 file - promoters50/3436319
ttaaatt

SEQ ID NO: 183779 - DNA, 7 bp, Unknown
  misc_feature (1)..( 7): Result.005 file - promoters50/3436319
ataaatt

SEQ ID NO: 183780 - DNA, 7 bp, Unknown
  misc_feature (1)..( 7): Result.005 file - promoters50/3436319
ttaaatt

SEQ ID NO: 183781 - DNA, 10 bp, Unknown
  misc_feature (1)..( 10): Result.005 file - promoters50/3436319
taataactaa

SEQ ID NO: 183782 - DNA, 10 bp, Unknown
  misc_feature (1)..( 10): Result.005 file - promoters50/3436319
taataattaa

SEQ ID NO: 183783 - DNA, 10 bp, Unknown
  misc_feature (1)..( 10): Result.005 file - promoters50/3436319
gaatacttag

SEQ ID NO: 183784 - DNA, 10 bp, Unknown
  misc_feature (1)..( 10): Result.005 file - promoters50/3436319
atataatttt

SEQ ID NO: 183785 - DNA, 8 bp, Unknown
  misc_feature (1)..( 8): Result.005 file - promoters50/3436319
aatgttac

SEQ ID NO: 183786 - DNA, 8 bp, Unknown
  misc_feature (1)..( 8): Result.005 file - promoters50/3436319
aatgtttg

SEQ ID NO: 183787 - DNA, 8 bp, Unknown
  misc_feature (1)..( 8): Result.005 file - promoters50/3436319
tatgtttg

SEQ ID NO: 183788 - DNA, 8 bp, Unknown
  misc_feature (1)..( 8): Result.005 file - promoters50/3436319
catatttc

SEQ ID NO: 183789 - DNA, 8 bp, Unknown
  misc_feature (1)..( 8): Result.005 file - promoters50/3436319
catctttt

SEQ ID NO: 183790 - DNA, 8 bp, Unknown
  misc_feature (1)..( 8): Result.005 file - promoters50/3436319
aatctttt

SEQ ID NO: 183791 - DNA, 9 bp, Unknown
  misc_feature (1)..( 9): Result.005 file - promoters50/3436412
tttgtatat

SEQ ID NO: 183792 - DNA, 9 bp, Unknown
  misc_feature (1)..( 9): Result.005 file - promoters50/3436412
attgtatct

SEQ ID NO: 183793 - DNA, 9 bp, Unknown
  misc_feature (1)..( 9): Result.005 file - promoters50/3436412
tttgtttat

SEQ ID NO: 183794 - DNA, 9 bp, Unknown
  misc_feature (1)..( 9): Result.005 file - promoters50/3436412
gttgattaa

SEQ ID NO: 183795 - DNA, 13 bp, Unknown
  misc_feature (1)..( 13): Result.005 file - promoters50/3436481
aaatattttactt

SEQ ID NO: 183796 - DNA, 13 bp, Unknown
  misc_feature (1)..( 13): Result.005 file - promoters50/3436481
ttatatttcgcaa

SEQ ID NO: 183797 - DNA, 13 bp, Unknown
  misc_feature (1)..( 13): Result.005 file - promoters50/3436481
tgaaattttttac

SEQ ID NO: 183798 - DNA, 13 bp, Unknown
  misc_feature (1)..( 13): Result.005 file - promoters50/3436481
aaaaatgtttaat

SEQ ID NO: 183799 - DNA, 13 bp, Unknown
  misc_feature (1)..( 13): Result.005 file - promoters50/3436481
taaaagaatcacc

SEQ ID NO: 183800 - DNA, 13 bp, Unknown
  misc_feature (1)..( 13): Result.005 file - promoters50/3436481
tcaaagaaacaag

SEQ ID NO: 183801 - DNA, 13 bp, Unknown
  misc_feature (1)..( 13): Result.005 file - promoters50/3436481
caccatttttcta

SEQ ID NO: 183802 - DNA, 16 bp, Unknown
  misc_feature (1)..( 16): Result.005 file - promoters50/3436481
tttcattacagattta

SEQ ID NO: 183803 - DNA, 16 bp, Unknown
  misc_feature (1)..( 16): Result.005 file - promoters50/3436481
ataacaaacaaatttc

SEQ ID NO: 183804 - DNA, 16 bp, Unknown
  misc_feature (1)..( 16): Result.005 file - promoters50/3436481
ataaaaaactaatcaa

SEQ ID NO: 183805 - DNA, 16 bp, Unknown
  misc_feature (1)..( 16): Result.005 file - promoters50/3436481
ccaatgaacaaaaaaa

SEQ ID NO: 183806 - DNA, 16 bp, Unknown
  misc_feature (1)..( 16): Result.005 file - promoters50/3436481
gctagatacaaaaccc

SEQ ID NO: 183807 - DNA, 16 bp, Unknown
  misc_feature (1)..( 16): Result.005 file - promoters50/3436481
aaaatttataaatgta

SEQ ID NO: 183808 - DNA, 13 bp, Unknown
  misc_feature (1)..( 13): Result.005 file - promoters50/3436481
tatacaaaatagt

SEQ ID NO: 183809 - DNA, 13 bp, Unknown
  misc_feature (1)..( 13): Result.005 file - promoters50/3436481
ctaacagaataaa

SEQ ID NO: 183810 - DNA, 13 bp, Unknown
  misc_feature (1)..( 13): Result.005 file - promoters50/3436481
taatcaacatatt

SEQ ID NO: 183811 - DNA, 13 bp, Unknown
  misc_feature (1)..( 13): Result.005 file - promoters50/3436481
taaacagtaaaat

SEQ ID NO: 183812 - DNA, 13 bp, Unknown
  misc_feature (1)..( 13): Result.005 file - promoters50/3436481
aaaaaagtataaa

SEQ ID NO: 183813 - DNA, 13 bp, Unknown
  misc_feature (1)..( 13): Result.005 file - promoters50/3436481
caaacaaatttca

SEQ ID NO: 183814 - DNA, 19 bp, Unknown
  misc_feature (1)..( 19): Result.005 file - promoters50/3436481
atcattaatttgtttattt

SEQ ID NO: 183815 - DNA, 19 bp, Unknown
  misc_feature (1)..( 19): Result.005 file - promoters50/3436481
aaaattgattttttttttt

SEQ ID NO: 183816 - DNA, 19 bp, Unknown
  misc_feature (1)..( 19): Result.005 file - promoters50/3436481
ttgtgtaatttttttctat

SEQ ID NO: 183817 - DNA, 19 bp, Unknown
  misc_feature (1)..( 19): Result.005 file - promoters50/3436481
atcattatttttttttgta

SEQ ID NO: 183818 - DNA, 19 bp, Unknown
  misc_feature (1)..( 19): Result.005 file - promoters50/3436481
cataaaattttgttttact

SEQ ID NO: 183819 - DNA, 19 bp, Unknown
  misc_feature (1)..( 19): Result.005 file - promoters50/3436481
ctctaccttttttttgttt

SEQ ID NO: 183820 - DNA, 12 bp, Unknown
  misc_feature (1)..( 12): Result.005 file - promoters50/3436529
tatatataaaga

SEQ ID NO: 183821 - DNA, 12 bp, Unknown
  misc_feature (1)..( 12): Result.005 file - promoters50/3436529
acaatataaaca

SEQ ID NO: 183822 - DNA, 12 bp, Unknown
  misc_feature (1)..( 12): Result.005 file - promoters50/3436529
tatatataaagc

SEQ ID NO: 183823 - DNA, 12 bp, Unknown
  misc_feature (1)..( 12): Result.005 file - promoters50/3436529
tatatatacaca

SEQ ID NO: 183824 - DNA, 12 bp, Unknown
  misc_feature (1)..( 12): Result.005 file - promoters50/3436529
ctcatataaata

SEQ ID NO: 183825 - DNA, 12 bp, Unknown
  misc_feature (1)..( 12): Result.005 file - promoters50/3436529
cacatattaaca

SEQ ID NO: 183826 - DNA, 9 bp, Unknown
  misc_feature (1)..( 9): Result.005 file - promoters50/3436529
aacttattt

SEQ ID NO: 183827 - DNA, 9 bp, Unknown
  misc_feature (1)..( 9): Result.005 file - promoters50/3436529
tttttattt

SEQ ID NO: 183828 - DNA, 9 bp, Unknown
  misc_feature (1)..( 9): Result.005 file - promoters50/3436529
tatatattt

SEQ ID NO: 183829 - DNA, 9 bp, Unknown
  misc_feature (1)..( 9): Result.005 file - promoters50/3436529
ttcttattt

SEQ ID NO: 183830 - DNA, 9 bp, Unknown
  misc_feature (1)..( 9): Result.005 file - promoters50/3436529
ttcttataa

SEQ ID NO: 183831 - DNA, 9 bp, Unknown
  misc_feature (1)..( 9): Result.005 file - promoters50/3436529
tatagattt

SEQ ID NO: 183832 - DNA, 11 bp, Unknown
  misc_feature (1)..( 11): Result.005 file - promoters50/3436529
attttgaaaaa

SEQ ID NO: 183833 - DNA, 11 bp, Unknown
  misc_feature (1)..( 11): Result.005 file - promoters50/3436529
ttttcgaatct

SEQ ID NO: 183834 - DNA, 11 bp, Unknown
  misc_feature (1)..( 11): Result.005 file - promoters50/3436529
ttttttaaaaa

SEQ ID NO: 183835 - DNA, 12 bp, Unknown
  misc_feature (1)..( 12): Result.005 file - promoters50/3436529
taattagaaaga

SEQ ID NO: 183836 - DNA, 12 bp, Unknown
  misc_feature (1)..( 12): Result.005 file - promoters50/3436529
attgtttaagat

SEQ ID NO: 183837 - DNA, 12 bp, Unknown
  misc_feature (1)..( 12): Result.005 file - promoters50/3436529
tttgtttctctt

SEQ ID NO: 183838 - DNA, 14 bp, Unknown
  misc_feature (1)..( 14): Result.005 file - promoters50/3436529
tcagatatacattg

SEQ ID NO: 183839 - DNA, 14 bp, Unknown
  misc_feature (1)..( 14): Result.005 file - promoters50/3436529
ttttctataaatta

SEQ ID NO: 183840 - DNA, 14 bp, Unknown
  misc_feature (1)..( 14): Result.005 file - promoters50/3436529
acggatttacttga

SEQ ID NO: 183841 - DNA, 14 bp, Unknown
  misc_feature (1)..( 14): Result.005 file - promoters50/3436529
agagctaaaaacgg

SEQ ID NO: 183842 - DNA, 14 bp, Unknown
  misc_feature (1)..( 14): Result.005 file - promoters50/3436529
ttttttatagatta

SEQ ID NO: 183843 - DNA, 14 bp, Unknown
  misc_feature (1)..( 14): Result.005 file - promoters50/3436529
acttttttttctga

SEQ ID NO: 183844 - DNA, 9 bp, Unknown
  misc_feature (1)..( 9): Result.005 file - promoters50/3436655
aaagggacc

SEQ ID NO: 183845 - DNA, 9 bp, Unknown
  misc_feature (1)..( 9): Result.005 file - promoters50/3436655
aaatggaat

SEQ ID NO: 183846 - DNA, 9 bp, Unknown
  misc_feature (1)..( 9): Result.005 file - promoters50/3436655
atatgtaat

SEQ ID NO: 183847 - DNA, 8 bp, Unknown
  misc_feature (1)..( 8): Result.005 file - promoters50/3436661
tttttttt

SEQ ID NO: 183848 - DNA, 8 bp, Unknown
  misc_feature (1)..( 8): Result.005 file - promoters50/3436661
tttttttt

SEQ ID NO: 183849 - DNA, 8 bp, Unknown
  misc_feature (1)..( 8): Result.005 file - promoters50/3436661
tttatcgt

SEQ ID NO: 183850 - DNA, 13 bp, Unknown
  misc_feature (1)..( 13): Result.005 file - promoters50/3436661
ctttagttccggt

SEQ ID NO: 183851 - DNA, 13 bp, Unknown
  misc_feature (1)..( 13): Result.005 file - promoters50/3436661
ctttggtttaatg

SEQ ID NO: 183852 - DNA, 13 bp, Unknown
  misc_feature (1)..( 13): Result.005 file - promoters50/3436661
gttttgttcaatg

SEQ ID NO: 183853 - DNA, 7 bp, Unknown
  misc_feature (1)..( 7): Result.005 file - promoters50/3436661
atacttt

SEQ ID NO: 183854 - DNA, 7 bp, Unknown
  misc_feature (1)..( 7): Result.005 file - promoters50/3436661
ttacttt

SEQ ID NO: 183855 - DNA, 7 bp, Unknown
  misc_feature (1)..( 7): Result.005 file - promoters50/3436661
atactta

SEQ ID NO: 183856 - DNA, 15 bp, Unknown
  misc_feature (1)..( 15): Result.005 file - promoters50/3436661
tttactgtagaacag

SEQ ID NO: 183857 - DNA, 15 bp, Unknown
  misc_feature (1)..( 15): Result.005 file - promoters50/3436661
tttactgtagaacag

SEQ ID NO: 183858 - DNA, 15 bp, Unknown
  misc_feature (1)..( 15): Result.005 file - promoters50/3436661
acagaagtagaaaga

SEQ ID NO: 183859 - DNA, 14 bp, Unknown
  misc_feature (1)..( 14): Result.005 file - promoters50/3436661
tctaaaatatctat

SEQ ID NO: 183860 - DNA, 14 bp, Unknown
  misc_feature (1)..( 14): Result.005 file - promoters50/3436661
tctagaattttatt

SEQ ID NO: 183861 - DNA, 14 bp, Unknown
  misc_feature (1)..( 14): Result.005 file - promoters50/3436661
actaaaatattatt

SEQ ID NO: 183862 - DNA, 7 bp, Unknown
  misc_feature (1)..( 7): Result.005 file - promoters50/3436661
taagtgg

SEQ ID NO: 183863 - DNA, 7 bp, Unknown
  misc_feature (1)..( 7): Result.005 file - promoters50/3436661
taactgg

SEQ ID NO: 183864 - DNA, 7 bp, Unknown
  misc_feature (1)..( 7): Result.005 file - promoters50/3436661
taaatgg

SEQ ID NO: 183865 - DNA, 9 bp, Unknown
  misc_feature (1)..( 9): Result.005 file - promoters50/3436661
gtttaatgt

SEQ ID NO: 183866 - DNA, 9 bp, Unknown
  misc_feature (1)..( 9): Result.005 file - promoters50/3436661
gttaaatta

SEQ ID NO: 183867 - DNA, 9 bp, Unknown
  misc_feature (1)..( 9): Result.005 file - promoters50/3436661
ctaaaatat

SEQ ID NO: 183868 - DNA, 13 bp, Unknown
  misc_feature (1)..( 13): Result.005 file - promoters50/3436661
atataattgtatt

SEQ ID NO: 183869 - DNA, 13 bp, Unknown
  misc_feature (1)..( 13): Result.005 file - promoters50/3436661
ctagaattttatt

SEQ ID NO: 183870 - DNA, 13 bp, Unknown
  misc_feature (1)..( 13): Result.005 file - promoters50/3436661
ctaaaatattatt

SEQ ID NO: 183871 - DNA, 7 bp, Unknown
  misc_feature (1)..( 7): Result.005 file - promoters50/3436661
aaaatat

SEQ ID NO: 183872 - DNA, 7 bp, Unknown
  misc_feature (1)..( 7): Result.005 file - promoters50/3436661
aaactat

SEQ ID NO: 183873 - DNA, 7 bp, Unknown
  misc_feature (1)..( 7): Result.005 file - promoters50/3436661
aaaatat

SEQ ID NO: 183874 - DNA, 12 bp, Unknown
  misc_feature (1)..( 12): Result.005 file - promoters50/3436718
gaaataagtttg

SEQ ID NO: 183875 - DNA, 12 bp, Unknown
  misc_feature (1)..( 12): Result.005 file - promoters50/3436718
tgtataactttg

SEQ ID NO: 183876 - DNA, 12 bp, Unknown
  misc_feature (1)..( 12): Result.005 file - promoters50/3436718
gaaattagtgat

SEQ ID NO: 183877 - DNA, 8 bp, Unknown
  misc_feature (1)..( 8): Result.005 file - promoters50/3436718
cttgcttc

SEQ ID NO: 183878 - DNA, 8 bp, Unknown
  misc_feature (1)..( 8): Result.005 file - promoters50/3436718
ctttctta

SEQ ID NO: 183879 - DNA, 8 bp, Unknown
  misc_feature (1)..( 8): Result.005 file - promoters50/3436718
ttttttta

SEQ ID NO: 183880 - DNA, 8 bp, Unknown
  misc_feature (1)..( 8): Result.005 file - promoters50/3436718
attgtttt

SEQ ID NO: 183881 - DNA, 8 bp, Unknown
  misc_feature (1)..( 8): Result.005 file - promoters50/3436718
gtaacaac

SEQ ID NO: 183882 - DNA, 8 bp, Unknown
  misc_feature (1)..( 8): Result.005 file - promoters50/3436718
ctaaaaac

SEQ ID NO: 183883 - DNA, 8 bp, Unknown
  misc_feature (1)..( 8): Result.005 file - promoters50/3436718
ctaaaatt

SEQ ID NO: 183884 - DNA, 13 bp, Unknown
  misc_feature (1)..( 13): Result.005 file - promoters50/3436718
agttattaatcac

SEQ ID NO: 183885 - DNA, 13 bp, Unknown
  misc_feature (1)..( 13): Result.005 file - promoters50/3436718
agtgattcatctt

SEQ ID NO: 183886 - DNA, 13 bp, Unknown
  misc_feature (1)..( 13): Result.005 file - promoters50/3436718
ataatttaatcac

SEQ ID NO: 183887 - DNA, 9 bp, Unknown
  misc_feature (1)..( 9): Result.005 file - promoters50/3436718
tttattaaa

SEQ ID NO: 183888 - DNA, 9 bp, Unknown
  misc_feature (1)..( 9): Result.005 file - promoters50/3436718
ttttttaaa

SEQ ID NO: 183889 - DNA, 9 bp, Unknown
  misc_feature (1)..( 9): Result.005 file - promoters50/3436718
actatgaaa

SEQ ID NO: 183890 - DNA, 12 bp, Unknown
  misc_feature (1)..( 12): Result.005 file - promoters50/3436718
aaaagttttatt

SEQ ID NO: 183891 - DNA, 12 bp, Unknown
  misc_feature (1)..( 12): Result.005 file - promoters50/3436718
aaaagttcatct

SEQ ID NO: 183892 - DNA, 12 bp, Unknown
  misc_feature (1)..( 12): Result.005 file - promoters50/3436718
caaacttcatct

SEQ ID NO: 183893 - DNA, 6 bp, Unknown
  misc_feature (1)..( 6): Result.005 file - promoters50/3436730
ttttta

SEQ ID NO: 183894 - DNA, 6 bp, Unknown
  misc_feature (1)..( 6): Result.005 file - promoters50/3436730
ttttta

SEQ ID NO: 183895 - DNA, 6 bp, Unknown
  misc_feature (1)..( 6): Result.005 file - promoters50/3436730
ttttta

SEQ ID NO: 183896 - DNA, 9 bp, Unknown
  misc_feature (1)..( 9): Result.005 file - promoters50/3436799
cttaaatat

SEQ ID NO: 183897 - DNA, 9 bp, Unknown
  misc_feature (1)..( 9): Result.005 file - promoters50/3436799
cttagatat

SEQ ID NO: 183898 - DNA, 9 bp, Unknown
  misc_feature (1)..( 9): Result.005 file - promoters50/3436799
cttgaatca

SEQ ID NO: 183899 - DNA, 11 bp, Unknown
  misc_feature (1)..( 11): Result.005 file - promoters50/3436799
taaaagaaaat

SEQ ID NO: 183900 - DNA, 11 bp, Unknown
  misc_feature (1)..( 11): Result.005 file - promoters50/3436799
taacagaataa

SEQ ID NO: 183901 - DNA, 11 bp, Unknown
  misc_feature (1)..( 11): Result.005 file - promoters50/3436799
aaacagagtaa

SEQ ID NO: 183902 - DNA, 10 bp, Unknown
  misc_feature (1)..( 10): Result.005 file - promoters50/3436799
gttaatcaaa

SEQ ID NO: 183903 - DNA, 10 bp, Unknown
  misc_feature (1)..( 10): Result.005 file - promoters50/3436799
aagaataaaa

SEQ ID NO: 183904 - DNA, 10 bp, Unknown
  misc_feature (1)..( 10): Result.005 file - promoters50/3436799
tcatataaat

SEQ ID NO: 183905 - DNA, 10 bp, Unknown
  misc_feature (1)..( 10): Result.005 file - promoters50/3436799
tgattgtttt

SEQ ID NO: 183906 - DNA, 10 bp, Unknown
  misc_feature (1)..( 10): Result.005 file - promoters50/3436799
caattttttt

SEQ ID NO: 183907 - DNA, 10 bp, Unknown
  misc_feature (1)..( 10): Result.005 file - promoters50/3436799
caattttgct

SEQ ID NO: 183908 - DNA, 13 bp, Unknown
  misc_feature (1)..( 13): Result.005 file - promoters50/3436883
agtaaatatttat

SEQ ID NO: 183909 - DNA, 13 bp, Unknown
  misc_feature (1)..( 13): Result.005 file - promoters50/3436883
tcaaaaaattcaa

SEQ ID NO: 183910 - DNA, 13 bp, Unknown
  misc_feature (1)..( 13): Result.005 file - promoters50/3436883
tagaaaaagtcaa

SEQ ID NO: 183911 - DNA, 13 bp, Unknown
  misc_feature (1)..( 13): Result.005 file - promoters50/3436883
aacgttaaggcaa

SEQ ID NO: 183912 - DNA, 13 bp, Unknown
  misc_feature (1)..( 13): Result.005 file - promoters50/3436883
aggaaaagataca

SEQ ID NO: 183913 - DNA, 10 bp, Unknown
  misc_feature (1)..( 10): Result.005 file - promoters50/3436943
tgctattaga

SEQ ID NO: 183914 - DNA, 10 bp, Unknown
  misc_feature (1)..( 10): Result.005 file - promoters50/3436943
agatatcaga

SEQ ID NO: 183915 - DNA, 10 bp, Unknown
  misc_feature (1)..( 10): Result.005 file - promoters50/3436943
agatctcaag

SEQ ID NO: 183916 - DNA, 11 bp, Unknown
  misc_feature (1)..( 11): Result.005 file - promoters50/3436943
tattccacaaa

SEQ ID NO: 183917 - DNA, 11 bp, Unknown
  misc_feature (1)..( 11): Result.005 file - promoters50/3436943
ttttccccaaa

SEQ ID NO: 183918 - DNA, 11 bp, Unknown
  misc_feature (1)..( 11): Result.005 file - promoters50/3436943
ttttcccacat

SEQ ID NO: 183919 - DNA, 8 bp, Unknown
  misc_feature (1)..( 8): Result.005 file - promoters50/3436971
cttacaaa

SEQ ID NO: 183920 - DNA, 8 bp, Unknown
  misc_feature (1)..( 8): Result.005 file - promoters50/3436971
attagaaa

SEQ ID NO: 183921 - DNA, 8 bp, Unknown
  misc_feature (1)..( 8): Result.005 file - promoters50/3436971
ctttcaag

SEQ ID NO: 183922 - DNA, 13 bp, Unknown
  misc_feature (1)..( 13): Result.005 file - promoters50/3437072
ataaaataaattt

SEQ ID NO: 183923 - DNA, 13 bp, Unknown
  misc_feature (1)..( 13): Result.005 file - promoters50/3437072
gctgaatcaattt

SEQ ID NO: 183924 - DNA, 13 bp, Unknown
  misc_feature (1)..( 13): Result.005 file - promoters50/3437072
atacaataattac

SEQ ID NO: 183925 - DNA, 13 bp, Unknown
  misc_feature (1)..( 13): Result.005 file - promoters50/3437072
aaaatatcaatac

SEQ ID NO: 183926 - DNA, 13 bp, Unknown
  misc_feature (1)..( 13): Result.005 file - promoters50/3437072
gttgattcatata

SEQ ID NO: 183927 - DNA, 13 bp, Unknown
  misc_feature (1)..( 13): Result.005 file - promoters50/3437072
agaggttcaattt

SEQ ID NO: 183928 - DNA, 10 bp, Unknown
  misc_feature (1)..( 10): Result.005 file - promoters50/3437072
agttaattta

SEQ ID NO: 183929 - DNA, 10 bp, Unknown
  misc_feature (1)..( 10): Result.005 file - promoters50/3437072
cattaaatta

SEQ ID NO: 183930 - DNA, 10 bp, Unknown
  misc_feature (1)..( 10): Result.005 file - promoters50/3437072
taataatttt

SEQ ID NO: 183931 - DNA, 10 bp, Unknown
  misc_feature (1)..( 10): Result.005 file - promoters50/3437072
acttaaatta

SEQ ID NO: 183932 - DNA, 10 bp, Unknown
  misc_feature (1)..( 10): Result.005 file - promoters50/3437072
catcaaaccg

SEQ ID NO: 183933 - DNA, 10 bp, Unknown
  misc_feature (1)..( 10): Result.005 file - promoters50/3437072
aaataattaa

SEQ ID NO: 183934 - DNA, 10 bp, Unknown
  misc_feature (1)..( 10): Result.005 file - promoters50/3437072
ataaaataaa

SEQ ID NO: 183935 - DNA, 10 bp, Unknown
  misc_feature (1)..( 10): Result.005 file - promoters50/3437072
ttaaaatatt

SEQ ID NO: 183936 - DNA, 10 bp, Unknown
  misc_feature (1)..( 10): Result.005 file - promoters50/3437072
ttaatatatt

SEQ ID NO: 183937 - DNA, 10 bp, Unknown
  misc_feature (1)..( 10): Result.005 file - promoters50/3437072
atagaatggc

SEQ ID NO: 183938 - DNA, 10 bp, Unknown
  misc_feature (1)..( 10): Result.005 file - promoters50/3437072
aaaaactaaa

SEQ ID NO: 183939 - DNA, 10 bp, Unknown
  misc_feature (1)..( 10): Result.005 file - promoters50/3437072
ttagaatata

SEQ ID NO: 183940 - DNA, 16 bp, Unknown
  misc_feature (1)..( 16): Result.005 file - promoters50/3437072
aaagactttaacagga

SEQ ID NO: 183941 - DNA, 16 bp, Unknown
  misc_feature (1)..( 16): Result.005 file - promoters50/3437072
cgattctttaaatttt

SEQ ID NO: 183942 - DNA, 16 bp, Unknown
  misc_feature (1)..( 16): Result.005 file - promoters50/3437072
ccaaattttacagaaa

SEQ ID NO: 183943 - DNA, 16 bp, Unknown
  misc_feature (1)..( 16): Result.005 file - promoters50/3437072
ttcttttttatattgc

SEQ ID NO: 183944 - DNA, 16 bp, Unknown
  misc_feature (1)..( 16): Result.005 file - promoters50/3437072
ttctattttattgtta

SEQ ID NO: 183945 - DNA, 16 bp, Unknown
  misc_feature (1)..( 16): Result.005 file - promoters50/3437072
gatatatttatatatt

SEQ ID NO: 183946 - DNA, 8 bp, Unknown
  misc_feature (1)..( 8): Result.005 file - promoters50/3437150
aaagaaga

SEQ ID NO: 183947 - DNA, 8 bp, Unknown
  misc_feature (1)..( 8): Result.005 file - promoters50/3437150
aaataagt

SEQ ID NO: 183948 - DNA, 8 bp, Unknown
  misc_feature (1)..( 8): Result.005 file - promoters50/3437150
aaaaaagg

SEQ ID NO: 183949 - DNA, 8 bp, Unknown
  misc_feature (1)..( 8): Result.005 file - promoters50/3437150
aaacaaga

SEQ ID NO: 183950 - DNA, 8 bp, Unknown
  misc_feature (1)..( 8): Result.005 file - promoters50/3437150
aaaaatac

SEQ ID NO: 183951 - DNA, 8 bp, Unknown
  misc_feature (1)..( 8): Result.005 file - promoters50/3437150
aaacatag

SEQ ID NO: 183952 - DNA, 8 bp, Unknown
  misc_feature (1)..( 8): Result.005 file - promoters50/3437150
taaaaagt

SEQ ID NO: 183953 - DNA, 13 bp, Unknown
  misc_feature (1)..( 13): Result.005 file - promoters50/3437150
agttataaaaact

SEQ ID NO: 183954 - DNA, 13 bp, Unknown
  misc_feature (1)..( 13): Result.005 file - promoters50/3437150
ctatatataaata

SEQ ID NO: 183955 - DNA, 13 bp, Unknown
  misc_feature (1)..( 13): Result.005 file - promoters50/3437150
catcataaaatga

SEQ ID NO: 183956 - DNA, 13 bp, Unknown
  misc_feature (1)..( 13): Result.005 file - promoters50/3437150
gttgataaaatta

SEQ ID NO: 183957 - DNA, 13 bp, Unknown
  misc_feature (1)..( 13): Result.005 file - promoters50/3437150
ccatataaaactc

SEQ ID NO: 183958 - DNA, 13 bp, Unknown
  misc_feature (1)..( 13): Result.005 file - promoters50/3437150
cctccaaaaaact

SEQ ID NO: 183959 - DNA, 13 bp, Unknown
  misc_feature (1)..( 13): Result.005 file - promoters50/3437150
ctatatataagct

SEQ ID NO: 183960 - DNA, 13 bp, Unknown
  misc_feature (1)..( 13): Result.005 file - promoters50/3437150
atttttcatttaa

SEQ ID NO: 183961 - DNA, 13 bp, Unknown
  misc_feature (1)..( 13): Result.005 file - promoters50/3437150
agaattcattatc

SEQ ID NO: 183962 - DNA, 13 bp, Unknown
  misc_feature (1)..( 13): Result.005 file - promoters50/3437150
gatttttatttgc

SEQ ID NO: 183963 - DNA, 13 bp, Unknown
  misc_feature (1)..( 13): Result.005 file - promoters50/3437150
aaaattaattatc

SEQ ID NO: 183964 - DNA, 13 bp, Unknown
  misc_feature (1)..( 13): Result.005 file - promoters50/3437150
agaattttgttat

SEQ ID NO: 183965 - DNA, 14 bp, Unknown
  misc_feature (1)..( 14): Result.005 file - promoters50/3437150
ataattttgttaaa

SEQ ID NO: 183966 - DNA, 15 bp, Unknown
  misc_feature (1)..( 15): Result.005 file - promoters50/3437150
gtttatttgaattaa

SEQ ID NO: 183967 - DNA, 15 bp, Unknown
  misc_feature (1)..( 15): Result.005 file - promoters50/3437150
tggattttgaatttt

SEQ ID NO: 183968 - DNA, 15 bp, Unknown
  misc_feature (1)..( 15): Result.005 file - promoters50/3437150
gagaacttgacttaa

SEQ ID NO: 183969 - DNA, 15 bp, Unknown
  misc_feature (1)..( 15): Result.005 file - promoters50/3437150
gtttatttgaacaaa

SEQ ID NO: 183970 - DNA, 15 bp, Unknown
  misc_feature (1)..( 15): Result.005 file - promoters50/3437150
atggcttagacttaa

SEQ ID NO: 183971 - DNA, 15 bp, Unknown
  misc_feature (1)..( 15): Result.005 file - promoters50/3437150
tactagacgacttaa

SEQ ID NO: 183972 - DNA, 15 bp, Unknown
  misc_feature (1)..( 15): Result.005 file - promoters50/3437150
ttctaatttattata

SEQ ID NO: 183973 - DNA, 15 bp, Unknown
  misc_feature (1)..( 15): Result.005 file - promoters50/3437150
ttaaatatttttcat

SEQ ID NO: 183974 - DNA, 15 bp, Unknown
  misc_feature (1)..( 15): Result.005 file - promoters50/3437150
gaaaagattgttgga

SEQ ID NO: 183975 - DNA, 15 bp, Unknown
  misc_feature (1)..( 15): Result.005 file - promoters50/3437150
ttaattatcaaaact

SEQ ID NO: 183976 - DNA, 15 bp, Unknown
  misc_feature (1)..( 15): Result.005 file - promoters50/3437150
agtataattttgtta

SEQ ID NO: 183977 - DNA, 16 bp, Unknown
  misc_feature (1)..( 16): Result.005 file - promoters50/3437150
agaattcattatctgt

SEQ ID NO: 183978 - DNA, 16 bp, Unknown
  misc_feature (1)..( 16): Result.005 file - promoters50/3437150
aagaagaattttgtta

SEQ ID NO: 183979 - DNA, 11 bp, Unknown
  misc_feature (1)..( 11): Result.005 file - promoters50/3437193
ttaataattcg

SEQ ID NO: 183980 - DNA, 11 bp, Unknown
  misc_feature (1)..( 11): Result.005 file - promoters50/3437193
tgaataattcc

SEQ ID NO: 183981 - DNA, 11 bp, Unknown
  misc_feature (1)..( 11): Result.005 file - promoters50/3437193
gtaacaattct

SEQ ID NO: 183982 - DNA, 11 bp, Unknown
  misc_feature (1)..( 11): Result.005 file - promoters50/3437193
ttaaaaattaa

SEQ ID NO: 183983 - DNA, 11 bp, Unknown
  misc_feature (1)..( 11): Result.005 file - promoters50/3437193
gctaaaatttc

SEQ ID NO: 183984 - DNA, 11 bp, Unknown
  misc_feature (1)..( 11): Result.005 file - promoters50/3437193
gatttaaatcc

SEQ ID NO: 183985 - DNA, 21 bp, Unknown
  misc_feature (1)..( 21): Result.005 file - promoters50/3437193
atgcgaatgcatgccatttcc

SEQ ID NO: 183986 - DNA, 21 bp, Unknown
  misc_feature (1)..( 21): Result.005 file - promoters50/3437193
atcacaatacatgtttttgat

SEQ ID NO: 183987 - DNA, 21 bp, Unknown
  misc_feature (1)..( 21): Result.005 file - promoters50/3437193
tgatatatacatacatatact

SEQ ID NO: 183988 - DNA, 21 bp, Unknown
  misc_feature (1)..( 21): Result.005 file - promoters50/3437193
agaaagaaacatattttcgat

SEQ ID NO: 183989 - DNA, 21 bp, Unknown
  misc_feature (1)..( 21): Result.005 file - promoters50/3437193
agtatatcacaaattgtttaa

SEQ ID NO: 183990 - DNA, 21 bp, Unknown
  misc_feature (1)..( 21): Result.005 file - promoters50/3437193
ttttctataaataaatttttg

SEQ ID NO: 183991 - DNA, 21 bp, Unknown
  misc_feature (1)..( 21): Result.005 file - promoters50/3437193
ggtatcaaacacgttatcaat

SEQ ID NO: 183992 - DNA, 15 bp, Unknown
  misc_feature (1)..( 15): Result.005 file - promoters50/3437193
atacatatactgtat

SEQ ID NO: 183993 - DNA, 15 bp, Unknown
  misc_feature (1)..( 15): Result.005 file - promoters50/3437193
aaacatattttcgat

SEQ ID NO: 183994 - DNA, 15 bp, Unknown
  misc_feature (1)..( 15): Result.005 file - promoters50/3437193
ataaataaatttttg

SEQ ID NO: 183995 - DNA, 15 bp, Unknown
  misc_feature (1)..( 15): Result.005 file - promoters50/3437193
atacatgtttttgat

SEQ ID NO: 183996 - DNA, 15 bp, Unknown
  misc_feature (1)..( 15): Result.005 file - promoters50/3437193
tcacaaattgtttaa

SEQ ID NO: 183997 - DNA, 15 bp, Unknown
  misc_feature (1)..( 15): Result.005 file - promoters50/3437193
aaacacgttatcaat

SEQ ID NO: 183998 - DNA, 11 bp, Unknown
  misc_feature (1)..( 11): Result.005 file - promoters50/3437208
tagtttttaga

SEQ ID NO: 183999 - DNA, 11 bp, Unknown
  misc_feature (1)..( 11): Result.005 file - promoters50/3437208
aaattttcaga

SEQ ID NO: 184000 - DNA, 11 bp, Unknown
  misc_feature (1)..( 11): Result.005 file - promoters50/3437208
aaattttcccc

SEQ ID NO: 184001 - DNA, 11 bp, Unknown
  misc_feature (1)..( 11): Result.005 file - promoters50/3437208
attagataaaa

SEQ ID NO: 184002 - DNA, 11 bp, Unknown
  misc_feature (1)..( 11): Result.005 file - promoters50/3437208
attaaataaaa

SEQ ID NO: 184003 - DNA, 11 bp, Unknown
  misc_feature (1)..( 11): Result.005 file - promoters50/3437208
acgaaatcaaa

SEQ ID NO: 184004 - DNA, 8 bp, Unknown
  misc_feature (1)..( 8): Result.005 file - promoters50/3437208
aaatgaaa

SEQ ID NO: 184005 - DNA, 8 bp, Unknown
  misc_feature (1)..( 8): Result.005 file - promoters50/3437208
aaatcaaa

SEQ ID NO: 184006 - DNA, 8 bp, Unknown
  misc_feature (1)..( 8): Result.005 file - promoters50/3437208
taattaaa

SEQ ID NO: 184007 - DNA, 7 bp, Unknown
  misc_feature (1)..( 7): Result.005 file - promoters50/3437208
aaataat

SEQ ID NO: 184008 - DNA, 7 bp, Unknown
  misc_feature (1)..( 7): Result.005 file - promoters50/3437208
aaataag

SEQ ID NO: 184009 - DNA, 7 bp, Unknown
  misc_feature (1)..( 7): Result.005 file - promoters50/3437208
aaaaaag

SEQ ID NO: 184010 - DNA, 8 bp, Unknown
  misc_feature (1)..( 8): Result.005 file - promoters50/3437212
taaaagaa

SEQ ID NO: 184011 - DNA, 8 bp, Unknown
  misc_feature (1)..( 8): Result.005 file - promoters50/3437212
taatagat

SEQ ID NO: 184012 - DNA, 8 bp, Unknown
  misc_feature (1)..( 8): Result.005 file - promoters50/3437212
taacagat

SEQ ID NO: 184013 - DNA, 6 bp, Unknown
  misc_feature (1)..( 6): Result.005 file - promoters50/3437212
tagata

SEQ ID NO: 184014 - DNA, 6 bp, Unknown
  misc_feature (1)..( 6): Result.005 file - promoters50/3437212
tagata

SEQ ID NO: 184015 - DNA, 6 bp, Unknown
  misc_feature (1)..( 6): Result.005 file - promoters50/3437212
tagata

SEQ ID NO: 184016 - DNA, 7 bp, Unknown
  misc_feature (1)..( 7): Result.005 file - promoters50/3437212
ataattt

SEQ ID NO: 184017 - DNA, 7 bp, Unknown
  misc_feature (1)..( 7): Result.005 file - promoters50/3437212
ataattc

SEQ ID NO: 184018 - DNA, 7 bp, Unknown
  misc_feature (1)..( 7): Result.005 file - promoters50/3437212
ataattt

SEQ ID NO: 184019 - DNA, 10 bp, Unknown
  misc_feature (1)..( 10): Result.005 file - promoters50/3437212
gttagaaatg

SEQ ID NO: 184020 - DNA, 10 bp, Unknown
  misc_feature (1)..( 10): Result.005 file - promoters50/3437212
gttataaacg

SEQ ID NO: 184021 - DNA, 10 bp, Unknown
  misc_feature (1)..( 10): Result.005 file - promoters50/3437212
cacatacacg

SEQ ID NO: 184022 - DNA, 13 bp, Unknown
  misc_feature (1)..( 13): Result.005 file - promoters50/3437244
acgaatcacaggg

SEQ ID NO: 184023 - DNA, 13 bp, Unknown
  misc_feature (1)..( 13): Result.005 file - promoters50/3437244
aagaatcaaccag

SEQ ID NO: 184024 - DNA, 13 bp, Unknown
  misc_feature (1)..( 13): Result.005 file - promoters50/3437244
tcgaatctaatat

SEQ ID NO: 184025 - DNA, 13 bp, Unknown
  misc_feature (1)..( 13): Result.005 file - promoters50/3437244
ttgaattacaaaa

SEQ ID NO: 184026 - DNA, 13 bp, Unknown
  misc_feature (1)..( 13): Result.005 file - promoters50/3437244
taaaatcaagtga

SEQ ID NO: 184027 - DNA, 13 bp, Unknown
  misc_feature (1)..( 13): Result.005 file - promoters50/3437244
tgtaatgaaccag

SEQ ID NO: 184028 - DNA, 13 bp, Unknown
  misc_feature (1)..( 13): Result.005 file - promoters50/3437244
acaaataaacata

SEQ ID NO: 184029 - DNA, 13 bp, Unknown
  misc_feature (1)..( 13): Result.005 file - promoters50/3437244
acaaaaaaagcta

SEQ ID NO: 184030 - DNA, 13 bp, Unknown
  misc_feature (1)..( 13): Result.005 file - promoters50/3437244
agggaacaagtct

SEQ ID NO: 184031 - DNA, 13 bp, Unknown
  misc_feature (1)..( 13): Result.005 file - promoters50/3437244
gtgtaacaattct

SEQ ID NO: 184032 - DNA, 13 bp, Unknown
  misc_feature (1)..( 13): Result.005 file - promoters50/3437244
aatgaaccagtga

SEQ ID NO: 184033 - DNA, 13 bp, Unknown
  misc_feature (1)..( 13): Result.005 file - promoters50/3437244
aatcaaccaggac

SEQ ID NO: 184034 - DNA, 13 bp, Unknown
  misc_feature (1)..( 13): Result.005 file - promoters50/3437244
gtttaaaaattaa

SEQ ID NO: 184035 - DNA, 13 bp, Unknown
  misc_feature (1)..( 13): Result.005 file - promoters50/3437244
ttggtaaaatttc

SEQ ID NO: 184036 - DNA, 13 bp, Unknown
  misc_feature (1)..( 13): Result.005 file - promoters50/3437244
ctgaaaatattaa

SEQ ID NO: 184037 - DNA, 11 bp, Unknown
  misc_feature (1)..( 11): Result.005 file - promoters50/3437244
taacaaaaaga

SEQ ID NO: 184038 - DNA, 11 bp, Unknown
  misc_feature (1)..( 11): Result.005 file - promoters50/3437244
aattaaaaagg

SEQ ID NO: 184039 - DNA, 11 bp, Unknown
  misc_feature (1)..( 11): Result.005 file - promoters50/3437244
aaccaaaacca

SEQ ID NO: 184040 - DNA, 11 bp, Unknown
  misc_feature (1)..( 11): Result.005 file - promoters50/3437244
aaacaaaaact

SEQ ID NO: 184041 - DNA, 11 bp, Unknown
  misc_feature (1)..( 11): Result.005 file - promoters50/3437244
gaccaaatacg

SEQ ID NO: 184042 - DNA, 11 bp, Unknown
  misc_feature (1)..( 11): Result.005 file - promoters50/3437244
acgtaaagact

SEQ ID NO: 184043 - DNA, 17 bp, Unknown
  misc_feature (1)..( 17): Result.005 file - promoters50/3437244
cattttaaaaaaagaag

SEQ ID NO: 184044 - DNA, 17 bp, Unknown
  misc_feature (1)..( 17): Result.005 file - promoters50/3437244
atagtcaaacaaatgtt

SEQ ID NO: 184045 - DNA, 17 bp, Unknown
  misc_feature (1)..( 17): Result.005 file - promoters50/3437244
aataataataaaataat

SEQ ID NO: 184046 - DNA, 17 bp, Unknown
  misc_feature (1)..( 17): Result.005 file - promoters50/3437244
caactatccaaaatgaa

SEQ ID NO: 184047 - DNA, 17 bp, Unknown
  misc_feature (1)..( 17): Result.005 file - promoters50/3437244
ttctataaataaatttt

SEQ ID NO: 184048 - DNA, 17 bp, Unknown
  misc_feature (1)..( 17): Result.005 file - promoters50/3437244
aatgataataagacttt

SEQ ID NO: 184049 - DNA, 10 bp, Unknown
  misc_feature (1)..( 10): Result.005 file - promoters50/3437331
aattatatgt

SEQ ID NO: 184050 - DNA, 10 bp, Unknown
  misc_feature (1)..( 10): Result.005 file - promoters50/3437331
ttttatttgt

SEQ ID NO: 184051 - DNA, 11 bp, Unknown
  misc_feature (1)..( 11): Result.005 file - promoters50/3437331
cttctatgtgt

SEQ ID NO: 184052 - DNA, 11 bp, Unknown
  misc_feature (1)..( 11): Result.005 file - promoters50/3437331
gtttgattttg

SEQ ID NO: 184053 - DNA, 11 bp, Unknown
  misc_feature (1)..( 11): Result.005 file - promoters50/3437331
gtacgatttgt

SEQ ID NO: 184054 - DNA, 11 bp, Unknown
  misc_feature (1)..( 11): Result.005 file - promoters50/3437331
tacttacttga

SEQ ID NO: 184055 - DNA, 16 bp, Unknown
  misc_feature (1)..( 16): Result.005 file - promoters50/3437331
ataagaaattgagaaa

SEQ ID NO: 184056 - DNA, 16 bp, Unknown
  misc_feature (1)..( 16): Result.005 file - promoters50/3437331
ttcagatatttttggc

SEQ ID NO: 184057 - DNA, 16 bp, Unknown
  misc_feature (1)..( 16): Result.005 file - promoters50/3437331
tatcgaatttgtccca

SEQ ID NO: 184058 - DNA, 16 bp, Unknown
  misc_feature (1)..( 16): Result.005 file - promoters50/3437331
tgaagaaaaaccctaa

SEQ ID NO: 184059 - DNA, 16 bp, Unknown
  misc_feature (1)..( 16): Result.005 file - promoters50/3437331
ttcatataatacaaaa

SEQ ID NO: 184060 - DNA, 16 bp, Unknown
  misc_feature (1)..( 16): Result.005 file - promoters50/3437331
agccgaatttctccca

SEQ ID NO: 184061 - DNA, 12 bp, Unknown
  misc_feature (1)..( 12): Result.005 file - promoters50/3437331
taccgaatggaa

SEQ ID NO: 184062 - DNA, 12 bp, Unknown
  misc_feature (1)..( 12): Result.005 file - promoters50/3437331
aaccaaattaca

SEQ ID NO: 184063 - DNA, 12 bp, Unknown
  misc_feature (1)..( 12): Result.005 file - promoters50/3437331
aaccagattaaa

SEQ ID NO: 184064 - DNA, 12 bp, Unknown
  misc_feature (1)..( 12): Result.005 file - promoters50/3437331
tcatagataaaa

SEQ ID NO: 184065 - DNA, 12 bp, Unknown
  misc_feature (1)..( 12): Result.005 file - promoters50/3437331
tgtcaaatttgt

SEQ ID NO: 184066 - DNA, 12 bp, Unknown
  misc_feature (1)..( 12): Result.005 file - promoters50/3437331
gaccaaaacgcg

SEQ ID NO: 184067 - DNA, 11 bp, Unknown
  misc_feature (1)..( 11): Result.005 file - promoters50/3437367
aaatttagtaa

SEQ ID NO: 184068 - DNA, 11 bp, Unknown
  misc_feature (1)..( 11): Result.005 file - promoters50/3437367
aaaattattaa

SEQ ID NO: 184069 - DNA, 11 bp, Unknown
  misc_feature (1)..( 11): Result.005 file - promoters50/3437367
tcaattactaa

SEQ ID NO: 184070 - DNA, 11 bp, Unknown
  misc_feature (1)..( 11): Result.005 file - promoters50/3437367
taatctagagg

SEQ ID NO: 184071 - DNA, 11 bp, Unknown
  misc_feature (1)..( 11): Result.005 file - promoters50/3437367
acatttctagt

SEQ ID NO: 184072 - DNA, 11 bp, Unknown
  misc_feature (1)..( 11): Result.005 file - promoters50/3437367
aaatcgagaga

SEQ ID NO: 184073 - DNA, 12 bp, Unknown
  misc_feature (1)..( 12): Result.005 file - promoters50/3437367
atgcattgtgag

SEQ ID NO: 184074 - DNA, 12 bp, Unknown
  misc_feature (1)..( 12): Result.005 file - promoters50/3437367
tattattttgaa

SEQ ID NO: 184075 - DNA, 12 bp, Unknown
  misc_feature (1)..( 12): Result.005 file - promoters50/3437367
ccatgtttcgaa

SEQ ID NO: 184076 - DNA, 12 bp, Unknown
  misc_feature (1)..( 12): Result.005 file - promoters50/3437367
gtttatttttta

SEQ ID NO: 184077 - DNA, 12 bp, Unknown
  misc_feature (1)..( 12): Result.005 file - promoters50/3437367
gtttctttgctc

SEQ ID NO: 184078 - DNA, 12 bp, Unknown
  misc_feature (1)..( 12): Result.005 file - promoters50/3437367
ttttattttacc

SEQ ID NO: 184079 - DNA, 9 bp, Unknown
  misc_feature (1)..( 9): Result.005 file - promoters50/3437367
attattatt

SEQ ID NO: 184080 - DNA, 9 bp, Unknown
  misc_feature (1)..( 9): Result.005 file - promoters50/3437367
atttttatt

SEQ ID NO: 184081 - DNA, 9 bp, Unknown
  misc_feature (1)..( 9): Result.005 file - promoters50/3437367
attattcaa

SEQ ID NO: 184082 - DNA, 9 bp, Unknown
  misc_feature (1)..( 9): Result.005 file - promoters50/3437367
gtttttaag

SEQ ID NO: 184083 - DNA, 9 bp, Unknown
  misc_feature (1)..( 9): Result.005 file - promoters50/3437367
tttagtcag

SEQ ID NO: 184084 - DNA, 9 bp, Unknown
  misc_feature (1)..( 9): Result.005 file - promoters50/3437367
atttggtct

SEQ ID NO: 184085 - DNA, 20 bp, Unknown
  misc_feature (1)..( 20): Result.005 file - promoters50/3437367
agagtttttaagaagattag

SEQ ID NO: 184086 - DNA, 20 bp, Unknown
  misc_feature (1)..( 20): Result.005 file - promoters50/3437367
tcagtgtttgatgcatagtt

SEQ ID NO: 184087 - DNA, 20 bp, Unknown
  misc_feature (1)..( 20): Result.005 file - promoters50/3437367
ctcatttttattttaatggt

SEQ ID NO: 184088 - DNA, 20 bp, Unknown
  misc_feature (1)..( 20): Result.005 file - promoters50/3437367
tgatgttttaatttaaatgg

SEQ ID NO: 184089 - DNA, 20 bp, Unknown
  misc_feature (1)..( 20): Result.005 file - promoters50/3437367
tcacttttcatttggtctcc

SEQ ID NO: 184090 - DNA, 20 bp, Unknown
  misc_feature (1)..( 20): Result.005 file - promoters50/3437367
aaatggtttaattgcttact

SEQ ID NO: 184091 - DNA, 20 bp, Unknown
  misc_feature (1)..( 20): Result.005 file - promoters50/3437367
cgacaatttgattccttgtt

SEQ ID NO: 184092 - DNA, 10 bp, Unknown
  misc_feature (1)..( 10): Result.005 file - promoters50/3437575
taaagaagaa

SEQ ID NO: 184093 - DNA, 10 bp, Unknown
  misc_feature (1)..( 10): Result.005 file - promoters50/3437575
taatgaagaa

SEQ ID NO: 184094 - DNA, 11 bp, Unknown
  misc_feature (1)..( 11): Result.005 file - promoters50/3437575
caatttaagtt

SEQ ID NO: 184095 - DNA, 8 bp, Unknown
  misc_feature (1)..( 8): Result.005 file - promoters50/3437575
taaattaa

SEQ ID NO: 184096 - DNA, 8 bp, Unknown
  misc_feature (1)..( 8): Result.005 file - promoters50/3437575
taagttaa

SEQ ID NO: 184097 - DNA, 8 bp, Unknown
  misc_feature (1)..( 8): Result.005 file - promoters50/3437575
gaagataa

SEQ ID NO: 184098 - DNA, 10 bp, Unknown
  misc_feature (1)..( 10): Result.005 file - promoters50/3437652
attaacaatc

SEQ ID NO: 184099 - DNA, 10 bp, Unknown
  misc_feature (1)..( 10): Result.005 file - promoters50/3437652
cctaaaaata

SEQ ID NO: 184100 - DNA, 10 bp, Unknown
  misc_feature (1)..( 10): Result.005 file - promoters50/3437652
gaaaacaatg

SEQ ID NO: 184101 - DNA, 10 bp, Unknown
  misc_feature (1)..( 10): Result.005 file - promoters50/3437652
attaaaaaaa

SEQ ID NO: 184102 - DNA, 10 bp, Unknown
  misc_feature (1)..( 10): Result.005 file - promoters50/3437652
tgtaagaaaa

SEQ ID NO: 184103 - DNA, 10 bp, Unknown
  misc_feature (1)..( 10): Result.005 file - promoters50/3437652
attaaaaaaa

SEQ ID NO: 184104 - DNA, 10 bp, Unknown
  misc_feature (1)..( 10): Result.005 file - promoters50/3437652
gaactttggt

SEQ ID NO: 184105 - DNA, 10 bp, Unknown
  misc_feature (1)..( 10): Result.005 file - promoters50/3437652
gaattttttt

SEQ ID NO: 184106 - DNA, 10 bp, Unknown
  misc_feature (1)..( 10): Result.005 file - promoters50/3437652
gaagtttctg

SEQ ID NO: 184107 - DNA, 10 bp, Unknown
  misc_feature (1)..( 10): Result.005 file - promoters50/3437652
taagtttaag

SEQ ID NO: 184108 - DNA, 10 bp, Unknown
  misc_feature (1)..( 10): Result.005 file - promoters50/3437652
tcatttattt

SEQ ID NO: 184109 - DNA, 10 bp, Unknown
  misc_feature (1)..( 10): Result.005 file - promoters50/3437652
taattttata

SEQ ID NO: 184110 - DNA, 12 bp, Unknown
  misc_feature (1)..( 12): Result.005 file - promoters50/3437652
aagaaatggtcc

SEQ ID NO: 184111 - DNA, 12 bp, Unknown
  misc_feature (1)..( 12): Result.005 file - promoters50/3437652
gagaaatgccat

SEQ ID NO: 184112 - DNA, 12 bp, Unknown
  misc_feature (1)..( 12): Result.005 file - promoters50/3437652
tagatatgataa

SEQ ID NO: 184113 - DNA, 12 bp, Unknown
  misc_feature (1)..( 12): Result.005 file - promoters50/3437652
aacatattataa

SEQ ID NO: 184114 - DNA, 12 bp, Unknown
  misc_feature (1)..( 12): Result.005 file - promoters50/3437652
aacatatgacta

SEQ ID NO: 184115 - DNA, 12 bp, Unknown
  misc_feature (1)..( 12): Result.005 file - promoters50/3437652
tagataatcctc

SEQ ID NO: 184116 - DNA, 9 bp, Unknown
  misc_feature (1)..( 9): Result.005 file - promoters50/3437652
aaaagttat

SEQ ID NO: 184117 - DNA, 9 bp, Unknown
  misc_feature (1)..( 9): Result.005 file - promoters50/3437652
aaaagtttt

SEQ ID NO: 184118 - DNA, 9 bp, Unknown
  misc_feature (1)..( 9): Result.005 file - promoters50/3437652
aaaattagc

SEQ ID NO: 184119 - DNA, 9 bp, Unknown
  misc_feature (1)..( 9): Result.005 file - promoters50/3437652
aaaagtcag

SEQ ID NO: 184120 - DNA, 9 bp, Unknown
  misc_feature (1)..( 9): Result.005 file - promoters50/3437652
aaaatttga

SEQ ID NO: 184121 - DNA, 9 bp, Unknown
  misc_feature (1)..( 9): Result.005 file - promoters50/3437652
taaattttg

SEQ ID NO: 184122 - DNA, 10 bp, Unknown
  misc_feature (1)..( 10): Result.005 file - promoters50/3437652
ataaatattc

SEQ ID NO: 184123 - DNA, 10 bp, Unknown
  misc_feature (1)..( 10): Result.005 file - promoters50/3437652
taaaaaattt

SEQ ID NO: 184124 - DNA, 10 bp, Unknown
  misc_feature (1)..( 10): Result.005 file - promoters50/3437652
acaaaacttt

SEQ ID NO: 184125 - DNA, 10 bp, Unknown
  misc_feature (1)..( 10): Result.005 file - promoters50/3437652
acaaaaccct

SEQ ID NO: 184126 - DNA, 10 bp, Unknown
  misc_feature (1)..( 10): Result.005 file - promoters50/3437652
agaaaaaaaa

SEQ ID NO: 184127 - DNA, 10 bp, Unknown
  misc_feature (1)..( 10): Result.005 file - promoters50/3437652
ccaagaccaa

SEQ ID NO: 184128 - DNA, 10 bp, Unknown
  misc_feature (1)..( 10): Result.005 file - promoters50/3437660
attactttgg

SEQ ID NO: 184129 - DNA, 10 bp, Unknown
  misc_feature (1)..( 10): Result.005 file - promoters50/3437660
attactttta

SEQ ID NO: 184130 - DNA, 10 bp, Unknown
  misc_feature (1)..( 10): Result.005 file - promoters50/3437660
attaatttat

SEQ ID NO: 184131 - DNA, 10 bp, Unknown
  misc_feature (1)..( 10): Result.005 file - promoters50/3437660
tgaactatgg

SEQ ID NO: 184132 - DNA, 10 bp, Unknown
  misc_feature (1)..( 10): Result.005 file - promoters50/3437660
tgaaatatat

SEQ ID NO: 184133 - DNA, 10 bp, Unknown
  misc_feature (1)..( 10): Result.005 file - promoters50/3437660
aaaaagatag

SEQ ID NO: 184134 - DNA, 10 bp, Unknown
  misc_feature (1)..( 10): Result.005 file - promoters50/3437660
ctaactcatg

SEQ ID NO: 184135 - DNA, 10 bp, Unknown
  misc_feature (1)..( 10): Result.005 file - promoters50/3437660
ataattcaaa

SEQ ID NO: 184136 - DNA, 10 bp, Unknown
  misc_feature (1)..( 10): Result.005 file - promoters50/3437660
taaattaaaa

SEQ ID NO: 184137 - DNA, 10 bp, Unknown
  misc_feature (1)..( 10): Result.005 file - promoters50/3437660
ataatttgat

SEQ ID NO: 184138 - DNA, 10 bp, Unknown
  misc_feature (1)..( 10): Result.005 file - promoters50/3437660
tcaattcaca

SEQ ID NO: 184139 - DNA, 10 bp, Unknown
  misc_feature (1)..( 10): Result.005 file - promoters50/3437660
taaattcagc

SEQ ID NO: 184140 - DNA, 7 bp, Unknown
  misc_feature (1)..( 7): Result.005 file - promoters50/3437664
gtatata

SEQ ID NO: 184141 - DNA, 7 bp, Unknown
  misc_feature (1)..( 7): Result.005 file - promoters50/3437664
ttatata

SEQ ID NO: 184142 - DNA, 7 bp, Unknown
  misc_feature (1)..( 7): Result.005 file - promoters50/3437664
atacata

SEQ ID NO: 184143 - DNA, 9 bp, Unknown
  misc_feature (1)..( 9): Result.005 file - promoters50/3437664
catttattt

SEQ ID NO: 184144 - DNA, 9 bp, Unknown
  misc_feature (1)..( 9): Result.005 file - promoters50/3437664
aatttattt

SEQ ID NO: 184145 - DNA, 9 bp, Unknown
  misc_feature (1)..( 9): Result.005 file - promoters50/3437664
catctatac

SEQ ID NO: 184146 - DNA, 7 bp, Unknown
  misc_feature (1)..( 7): Result.005 file - promoters50/3437664
atttatt

SEQ ID NO: 184147 - DNA, 7 bp, Unknown
  misc_feature (1)..( 7): Result.005 file - promoters50/3437664
attcatt

SEQ ID NO: 184148 - DNA, 7 bp, Unknown
  misc_feature (1)..( 7): Result.005 file - promoters50/3437664
atttata

SEQ ID NO: 184149 - DNA, 7 bp, Unknown
  misc_feature (1)..( 7): Result.005 file - promoters50/3437671
ttaggtc

SEQ ID NO: 184150 - DNA, 7 bp, Unknown
  misc_feature (1)..( 7): Result.005 file - promoters50/3437671
ttaggtg

SEQ ID NO: 184151 - DNA, 7 bp, Unknown
  misc_feature (1)..( 7): Result.005 file - promoters50/3437671
ttatgtg

SEQ ID NO: 184152 - DNA, 9 bp, Unknown
  misc_feature (1)..( 9): Result.005 file - promoters50/3437683
atatctttt

SEQ ID NO: 184153 - DNA, 9 bp, Unknown
  misc_feature (1)..( 9): Result.005 file - promoters50/3437683
atatttttt

SEQ ID NO: 184154 - DNA, 9 bp, Unknown
  misc_feature (1)..( 9): Result.005 file - promoters50/3437683
aagtttttg

SEQ ID NO: 184155 - DNA, 9 bp, Unknown
  misc_feature (1)..( 9): Result.005 file - promoters50/3437683
acattttta

SEQ ID NO: 184156 - DNA, 10 bp, Unknown
  misc_feature (1)..( 10): Result.005 file - promoters50/3437683
ccttataaat

SEQ ID NO: 184157 - DNA, 10 bp, Unknown
  misc_feature (1)..( 10): Result.005 file - promoters50/3437683
ttctataaat

SEQ ID NO: 184158 - DNA, 10 bp, Unknown
  misc_feature (1)..( 10): Result.005 file - promoters50/3437683
ttctataagt

SEQ ID NO: 184159 - DNA, 8 bp, Unknown
  misc_feature (1)..( 8): Result.005 file - promoters50/3437683
aattgatc

SEQ ID NO: 184160 - DNA, 8 bp, Unknown
  misc_feature (1)..( 8): Result.005 file - promoters50/3437683
aattgatt

SEQ ID NO: 184161 - DNA, 8 bp, Unknown
  misc_feature (1)..( 8): Result.005 file - promoters50/3437683
gattcatt

SEQ ID NO: 184162 - DNA, 8 bp, Unknown
  misc_feature (1)..( 8): Result.005 file - promoters50/3437683
ttttacta

SEQ ID NO: 184163 - DNA, 8 bp, Unknown
  misc_feature (1)..( 8): Result.005 file - promoters50/3437683
ttttacta

SEQ ID NO: 184164 - DNA, 8 bp, Unknown
  misc_feature (1)..( 8): Result.005 file - promoters50/3437683
cattacta

SEQ ID NO: 184165 - DNA, 11 bp, Unknown
  misc_feature (1)..( 11): Result.005 file - promoters50/3437710
caaggaattta

SEQ ID NO: 184166 - DNA, 11 bp, Unknown
  misc_feature (1)..( 11): Result.005 file - promoters50/3437710
cgaataattta

SEQ ID NO: 184167 - DNA, 11 bp, Unknown
  misc_feature (1)..( 11): Result.005 file - promoters50/3437710
ttcataatttg

SEQ ID NO: 184168 - DNA, 11 bp, Unknown
  misc_feature (1)..( 11): Result.005 file - promoters50/3437710
cacataatgca

SEQ ID NO: 184169 - DNA, 11 bp, Unknown
  misc_feature (1)..( 11): Result.005 file - promoters50/3437710
ttcaaaatttt

SEQ ID NO: 184170 - DNA, 12 bp, Unknown
  misc_feature (1)..( 12): Result.005 file - promoters50/3437710
gtgtaaatcttt

SEQ ID NO: 184171 - DNA, 15 bp, Unknown
  misc_feature (1)..( 15): Result.005 file - promoters50/3437710
aaaataaaacattat

SEQ ID NO: 184172 - DNA, 15 bp, Unknown
  misc_feature (1)..( 15): Result.005 file - promoters50/3437710
aattaaaatcattaa

SEQ ID NO: 184173 - DNA, 15 bp, Unknown
  misc_feature (1)..( 15): Result.005 file - promoters50/3437710
tatataaatcatatg

SEQ ID NO: 184174 - DNA, 15 bp, Unknown
  misc_feature (1)..( 15): Result.005 file - promoters50/3437710
tttacatttcaataa

SEQ ID NO: 184175 - DNA, 15 bp, Unknown
  misc_feature (1)..( 15): Result.005 file - promoters50/3437710
tatataaaccaattt

SEQ ID NO: 184176 - DNA, 15 bp, Unknown
  misc_feature (1)..( 15): Result.005 file - promoters50/3437710
tatatattgcaatct

SEQ ID NO: 184177 - DNA, 10 bp, Unknown
  misc_feature (1)..( 10): Result.005 file - promoters50/3437710
aaattcgaat

SEQ ID NO: 184178 - DNA, 10 bp, Unknown
  misc_feature (1)..( 10): Result.005 file - promoters50/3437710
aaattcataa

SEQ ID NO: 184179 - DNA, 10 bp, Unknown
  misc_feature (1)..( 10): Result.005 file - promoters50/3437710
gaattcatgg

SEQ ID NO: 184180 - DNA, 10 bp, Unknown
  misc_feature (1)..( 10): Result.005 file - promoters50/3437710
aaattcattg

SEQ ID NO: 184181 - DNA, 10 bp, Unknown
  misc_feature (1)..( 10): Result.005 file - promoters50/3437710
tcgttctttg

SEQ ID NO: 184182 - DNA, 10 bp, Unknown
  misc_feature (1)..( 10): Result.005 file - promoters50/3437710
taaatctttg

SEQ ID NO: 184183 - DNA, 10 bp, Unknown
  misc_feature (1)..( 10): Result.005 file - promoters50/3437710
aaattttttt

SEQ ID NO: 184184 - DNA, 8 bp, Unknown
  misc_feature (1)..( 8): Result.005 file - promoters50/3437725
tagagcaa

SEQ ID NO: 184185 - DNA, 8 bp, Unknown
  misc_feature (1)..( 8): Result.005 file - promoters50/3437725
gagaacaa

SEQ ID NO: 184186 - DNA, 8 bp, Unknown
  misc_feature (1)..( 8): Result.005 file - promoters50/3437725
gagaaaac

SEQ ID NO: 184187 - DNA, 8 bp, Unknown
  misc_feature (1)..( 8): Result.005 file - promoters50/3437725
tgaaaatc

SEQ ID NO: 184188 - DNA, 8 bp, Unknown
  misc_feature (1)..( 8): Result.005 file - promoters50/3437725
tgataata

SEQ ID NO: 184189 - DNA, 8 bp, Unknown
  misc_feature (1)..( 8): Result.005 file - promoters50/3437725
aaataata

SEQ ID NO: 184190 - DNA, 7 bp, Unknown
  misc_feature (1)..( 7): Result.005 file - promoters50/3437776
atttacc

SEQ ID NO: 184191 - DNA, 7 bp, Unknown
  misc_feature (1)..( 7): Result.005 file - promoters50/3437776
attaacc

SEQ ID NO: 184192 - DNA, 7 bp, Unknown
  misc_feature (1)..( 7): Result.005 file - promoters50/3437776
atttaca

SEQ ID NO: 184193 - DNA, 11 bp, Unknown
  misc_feature (1)..( 11): Result.005 file - promoters50/3437779
agtatatttcc

SEQ ID NO: 184194 - DNA, 11 bp, Unknown
  misc_feature (1)..( 11): Result.005 file - promoters50/3437779
tatatattcta

SEQ ID NO: 184195 - DNA, 11 bp, Unknown
  misc_feature (1)..( 11): Result.005 file - promoters50/3437779
agtatataatt

SEQ ID NO: 184196 - DNA, 11 bp, Unknown
  misc_feature (1)..( 11): Result.005 file - promoters50/3437779
tttatttttta

SEQ ID NO: 184197 - DNA, 11 bp, Unknown
  misc_feature (1)..( 11): Result.005 file - promoters50/3437779
gagatttcttt

SEQ ID NO: 184198 - DNA, 11 bp, Unknown
  misc_feature (1)..( 11): Result.005 file - promoters50/3437779
gatatgagaaa

SEQ ID NO: 184199 - DNA, 11 bp, Unknown
  misc_feature (1)..( 11): Result.005 file - promoters50/3437779
catctgacaaa

SEQ ID NO: 184200 - DNA, 11 bp, Unknown
  misc_feature (1)..( 11): Result.005 file - promoters50/3437779
tttctaacaaa

SEQ ID NO: 184201 - DNA, 11 bp, Unknown
  misc_feature (1)..( 11): Result.005 file - promoters50/3437779
ctaatgacaat

SEQ ID NO: 184202 - DNA, 11 bp, Unknown
  misc_feature (1)..( 11): Result.005 file - promoters50/3437779
tttttaatttg

SEQ ID NO: 184203 - DNA, 9 bp, Unknown
  misc_feature (1)..( 9): Result.005 file - promoters50/3437779
attactttt

SEQ ID NO: 184204 - DNA, 9 bp, Unknown
  misc_feature (1)..( 9): Result.005 file - promoters50/3437779
atttctttg

SEQ ID NO: 184205 - DNA, 9 bp, Unknown
  misc_feature (1)..( 9): Result.005 file - promoters50/3437779
tttaatttt

SEQ ID NO: 184206 - DNA, 9 bp, Unknown
  misc_feature (1)..( 9): Result.005 file - promoters50/3437779
tttattttt

SEQ ID NO: 184207 - DNA, 9 bp, Unknown
  misc_feature (1)..( 9): Result.005 file - promoters50/3437779
cctattttt

SEQ ID NO: 184208 - DNA, 12 bp, Unknown
  misc_feature (1)..( 12): Result.005 file - promoters50/3437779
gatattattatg

SEQ ID NO: 184209 - DNA, 12 bp, Unknown
  misc_feature (1)..( 12): Result.005 file - promoters50/3437779
aaaattattaaa

SEQ ID NO: 184210 - DNA, 12 bp, Unknown
  misc_feature (1)..( 12): Result.005 file - promoters50/3437779
gcatttactaat

SEQ ID NO: 184211 - DNA, 12 bp, Unknown
  misc_feature (1)..( 12): Result.005 file - promoters50/3437779
aaaatcattata

SEQ ID NO: 184212 - DNA, 12 bp, Unknown
  misc_feature (1)..( 12): Result.005 file - promoters50/3437779
cataacattata

SEQ ID NO: 184213 - DNA, 12 bp, Unknown
  misc_feature (1)..( 12): Result.005 file - promoters50/3437803
tttattttaaag

SEQ ID NO: 184214 - DNA, 12 bp, Unknown
  misc_feature (1)..( 12): Result.005 file - promoters50/3437803
tcctatttaaat

SEQ ID NO: 184215 - DNA, 12 bp, Unknown
  misc_feature (1)..( 12): Result.005 file - promoters50/3437803
ccctatataaag

SEQ ID NO: 184216 - DNA, 12 bp, Unknown
  misc_feature (1)..( 12): Result.005 file - promoters50/3437803
tcctatttaaac

SEQ ID NO: 184217 - DNA, 12 bp, Unknown
  misc_feature (1)..( 12): Result.005 file - promoters50/3437803
gataatataaag

SEQ ID NO: 184218 - DNA, 8 bp, Unknown
  misc_feature (1)..( 8): Result.005 file - promoters50/3437803
ttctaaaa

SEQ ID NO: 184219 - DNA, 8 bp, Unknown
  misc_feature (1)..( 8): Result.005 file - promoters50/3437803
ttccaaaa

SEQ ID NO: 184220 - DNA, 8 bp, Unknown
  misc_feature (1)..( 8): Result.005 file - promoters50/3437803
ttctaagc

SEQ ID NO: 184221 - DNA, 8 bp, Unknown
  misc_feature (1)..( 8): Result.005 file - promoters50/3437803
gaccaaaa

SEQ ID NO: 184222 - DNA, 8 bp, Unknown
  misc_feature (1)..( 8): Result.005 file - promoters50/3437803
gtccaaag

SEQ ID NO: 184223 - DNA, 11 bp, Unknown
  misc_feature (1)..( 11): Result.005 file - promoters50/3437871
aaacgaaacac

SEQ ID NO: 184224 - DNA, 11 bp, Unknown
  misc_feature (1)..( 11): Result.005 file - promoters50/3437871
gatggaaacaa

SEQ ID NO: 184225 - DNA, 11 bp, Unknown
  misc_feature (1)..( 11): Result.005 file - promoters50/3437871
gacaaaaacct

SEQ ID NO: 184226 - DNA, 11 bp, Unknown
  misc_feature (1)..( 11): Result.005 file - promoters50/3437871
gaccaaaagag

SEQ ID NO: 184227 - DNA, 11 bp, Unknown
  misc_feature (1)..( 11): Result.005 file - promoters50/3437871
agaaaaaattt

SEQ ID NO: 184228 - DNA, 11 bp, Unknown
  misc_feature (1)..( 11): Result.005 file - promoters50/3437871
tattaaaattt

SEQ ID NO: 184229 - DNA, 11 bp, Unknown
  misc_feature (1)..( 11): Result.005 file - promoters50/3437871
aaagaaaatta

SEQ ID NO: 184230 - DNA, 11 bp, Unknown
  misc_feature (1)..( 11): Result.005 file - promoters50/3437871
aaaggaaatgt

SEQ ID NO: 184231 - DNA, 11 bp, Unknown
  misc_feature (1)..( 11): Result.005 file - promoters50/3437871
agaaaaagaag

SEQ ID NO: 184232 - DNA, 11 bp, Unknown
  misc_feature (1)..( 11): Result.005 file - promoters50/3437871
cataaaagaaa

SEQ ID NO: 184233 - DNA, 11 bp, Unknown
  misc_feature (1)..( 11): Result.005 file - promoters50/3437871
tgtcaaagaag

SEQ ID NO: 184234 - DNA, 12 bp, Unknown
  misc_feature (1)..( 12): Result.005 file - promoters50/3437871
catataagcaaa

SEQ ID NO: 184235 - DNA, 7 bp, Unknown
  misc_feature (1)..( 7): Result.005 file - promoters50/3437962
attttta

SEQ ID NO: 184236 - DNA, 7 bp, Unknown
  misc_feature (1)..( 7): Result.005 file - promoters50/3437962
atttttt

SEQ ID NO: 184237 - DNA, 8 bp, Unknown
  misc_feature (1)..( 8): Result.005 file - promoters50/3437962
gtttatta

SEQ ID NO: 184238 - DNA, 8 bp, Unknown
  misc_feature (1)..( 8): Result.005 file - promoters50/3437962
atttaaat

SEQ ID NO: 184239 - DNA, 8 bp, Unknown
  misc_feature (1)..( 8): Result.005 file - promoters50/3437962
ttttaaaa

SEQ ID NO: 184240 - DNA, 8 bp, Unknown
  misc_feature (1)..( 8): Result.005 file - promoters50/3437962
aattaaaa

SEQ ID NO: 184241 - DNA, 7 bp, Unknown
  misc_feature (1)..( 7): Result.005 file - promoters50/3438027
gttcttt

SEQ ID NO: 184242 - DNA, 7 bp, Unknown
  misc_feature (1)..( 7): Result.005 file - promoters50/3438027
tttcttt

SEQ ID NO: 184243 - DNA, 7 bp, Unknown
  misc_feature (1)..( 7): Result.005 file - promoters50/3438027
tttcttc

SEQ ID NO: 184244 - DNA, 9 bp, Unknown
  misc_feature (1)..( 9): Result.005 file - promoters50/3438046
taacaaaca

SEQ ID NO: 184245 - DNA, 9 bp, Unknown
  misc_feature (1)..( 9): Result.005 file - promoters50/3438046
taagaaaac

SEQ ID NO: 184246 - DNA, 9 bp, Unknown
  misc_feature (1)..( 9): Result.005 file - promoters50/3438046
catgaaaga

SEQ ID NO: 184247 - DNA, 11 bp, Unknown
  misc_feature (1)..( 11): Result.005 file - promoters50/3438046
tgacgatttat

SEQ ID NO: 184248 - DNA, 11 bp, Unknown
  misc_feature (1)..( 11): Result.005 file - promoters50/3438046
cctatatttat

SEQ ID NO: 184249 - DNA, 11 bp, Unknown
  misc_feature (1)..( 11): Result.005 file - promoters50/3438046
cctaaatttac

SEQ ID NO: 184250 - DNA, 8 bp, Unknown
  misc_feature (1)..( 8): Result.005 file - promoters50/3438065
tgtaaaag

SEQ ID NO: 184251 - DNA, 8 bp, Unknown
  misc_feature (1)..( 8): Result.005 file - promoters50/3438065
agtaaaat

SEQ ID NO: 184252 - DNA, 8 bp, Unknown
  misc_feature (1)..( 8): Result.005 file - promoters50/3438065
attaaaat

SEQ ID NO: 184253 - DNA, 8 bp, Unknown
  misc_feature (1)..( 8): Result.005 file - promoters50/3438065
agttaaat

SEQ ID NO: 184254 - DNA, 12 bp, Unknown
  misc_feature (1)..( 12): Result.005 file - promoters50/3438065
agaatcaaaaca

SEQ ID NO: 184255 - DNA, 12 bp, Unknown
  misc_feature (1)..( 12): Result.005 file - promoters50/3438065
ttaatcaaaagt

SEQ ID NO: 184256 - DNA, 12 bp, Unknown
  misc_feature (1)..( 12): Result.005 file - promoters50/3438065
ttattcagaaaa

SEQ ID NO: 184257 - DNA, 12 bp, Unknown
  misc_feature (1)..( 12): Result.005 file - promoters50/3438065
aaagacaaaagt

SEQ ID NO: 184258 - DNA, 9 bp, Unknown
  misc_feature (1)..( 9): Result.005 file - promoters50/3438065
gaaactttg

SEQ ID NO: 184259 - DNA, 9 bp, Unknown
  misc_feature (1)..( 9): Result.005 file - promoters50/3438065
gaaaatttg

SEQ ID NO: 184260 - DNA, 9 bp, Unknown
  misc_feature (1)..( 9): Result.005 file - promoters50/3438065
gaagctttt

SEQ ID NO: 184261 - DNA, 9 bp, Unknown
  misc_feature (1)..( 9): Result.005 file - promoters50/3438065
ataaattta

SEQ ID NO: 184262 - DNA, 13 bp, Unknown
  misc_feature (1)..( 13): Result.005 file - promoters50/3438065
aaaacagagcttc

SEQ ID NO: 184263 - DNA, 13 bp, Unknown
  misc_feature (1)..( 13): Result.005 file - promoters50/3438065
aaaacaaacgaaa

SEQ ID NO: 184264 - DNA, 13 bp, Unknown
  misc_feature (1)..( 13): Result.005 file - promoters50/3438065
aaaaaaaaaaaaa

SEQ ID NO: 184265 - DNA, 13 bp, Unknown
  misc_feature (1)..( 13): Result.005 file - promoters50/3438065
aaagaaatatcgc

SEQ ID NO: 184266 - DNA, 10 bp, Unknown
  misc_feature (1)..( 10): Result.005 file - promoters50/3438077
aaagcccatt

SEQ ID NO: 184267 - DNA, 10 bp, Unknown
  misc_feature (1)..( 10): Result.005 file - promoters50/3438077
aaagcccaaa

SEQ ID NO: 184268 - DNA, 10 bp, Unknown
  misc_feature (1)..( 10): Result.005 file - promoters50/3438077
aaagccctag

SEQ ID NO: 184269 - DNA, 10 bp, Unknown
  misc_feature (1)..( 10): Result.005 file - promoters50/3438077
taggcccaac

SEQ ID NO: 184270 - DNA, 10 bp, Unknown
  misc_feature (1)..( 10): Result.005 file - promoters50/3438077
tcggcccacc

SEQ ID NO: 184271 - DNA, 10 bp, Unknown
  misc_feature (1)..( 10): Result.005 file - promoters50/3438077
aaggcccaat

SEQ ID NO: 184272 - DNA, 10 bp, Unknown
  misc_feature (1)..( 10): Result.005 file - promoters50/3438077
tgggcctaat

SEQ ID NO: 184273 - DNA, 9 bp, Unknown
  misc_feature (1)..( 9): Result.005 file - promoters50/3438077
agacccaaa

SEQ ID NO: 184274 - DNA, 9 bp, Unknown
  misc_feature (1)..( 9): Result.005 file - promoters50/3438077
aagcccaaa

SEQ ID NO: 184275 - DNA, 9 bp, Unknown
  misc_feature (1)..( 9): Result.005 file - promoters50/3438077
aggcccaac

SEQ ID NO: 184276 - DNA, 9 bp, Unknown
  misc_feature (1)..( 9): Result.005 file - promoters50/3438077
cggcccacc

SEQ ID NO: 184277 - DNA, 9 bp, Unknown
  misc_feature (1)..( 9): Result.005 file - promoters50/3438077
aggcccaat

SEQ ID NO: 184278 - DNA, 9 bp, Unknown
  misc_feature (1)..( 9): Result.005 file - promoters50/3438077
gggcctaat

SEQ ID NO: 184279 - DNA, 10 bp, Unknown
  misc_feature (1)..( 10): Result.005 file - promoters50/3438171
atttttattg

SEQ ID NO: 184280 - DNA, 10 bp, Unknown
  misc_feature (1)..( 10): Result.005 file - promoters50/3438171
aattttatta

SEQ ID NO: 184281 - DNA, 10 bp, Unknown
  misc_feature (1)..( 10): Result.005 file - promoters50/3438171
ctttttattt

SEQ ID NO: 184282 - DNA, 10 bp, Unknown
  misc_feature (1)..( 10): Result.005 file - promoters50/3438171
atttttactc

SEQ ID NO: 184283 - DNA, 10 bp, Unknown
  misc_feature (1)..( 10): Result.005 file - promoters50/3438171
ctggttatta

SEQ ID NO: 184284 - DNA, 10 bp, Unknown
  misc_feature (1)..( 10): Result.005 file - promoters50/3438171
gtttctgttt

SEQ ID NO: 184285 - DNA, 12 bp, Unknown
  misc_feature (1)..( 12): Result.005 file - promoters50/3438171
tgtttaaaacaa

SEQ ID NO: 184286 - DNA, 12 bp, Unknown
  misc_feature (1)..( 12): Result.005 file - promoters50/3438171
gatttaaagaca

SEQ ID NO: 184287 - DNA, 12 bp, Unknown
  misc_feature (1)..( 12): Result.005 file - promoters50/3438171
catttaaataaa

SEQ ID NO: 184288 - DNA, 12 bp, Unknown
  misc_feature (1)..( 12): Result.005 file - promoters50/3438171
tgttcaaaattg

SEQ ID NO: 184289 - DNA, 12 bp, Unknown
  misc_feature (1)..( 12): Result.005 file - promoters50/3438171
cctttgaataaa

SEQ ID NO: 184290 - DNA, 12 bp, Unknown
  misc_feature (1)..( 12): Result.005 file - promoters50/3438171
caattaaaaagg

SEQ ID NO: 184291 - DNA, 12 bp, Unknown
  misc_feature (1)..( 12): Result.005 file - promoters50/3438171
tgttcaaggctt

SEQ ID NO: 184292 - DNA, 12 bp, Unknown
  misc_feature (1)..( 12): Result.005 file - promoters50/3438171
tttatataagtg

SEQ ID NO: 184293 - DNA, 12 bp, Unknown
  misc_feature (1)..( 12): Result.005 file - promoters50/3438171
aaaatataaata

SEQ ID NO: 184294 - DNA, 12 bp, Unknown
  misc_feature (1)..( 12): Result.005 file - promoters50/3438171
gctatttaagta

SEQ ID NO: 184295 - DNA, 12 bp, Unknown
  misc_feature (1)..( 12): Result.005 file - promoters50/3438171
cgtatatataaa

SEQ ID NO: 184296 - DNA, 12 bp, Unknown
  misc_feature (1)..( 12): Result.005 file - promoters50/3438171
cacttataaata

SEQ ID NO: 184297 - DNA, 12 bp, Unknown
  misc_feature (1)..( 12): Result.005 file - promoters50/3438171
tatatataaaac

SEQ ID NO: 184298 - DNA, 13 bp, Unknown
  misc_feature (1)..( 13): Result.005 file - promoters50/3438171
caataaaaaaaaa

SEQ ID NO: 184299 - DNA, 13 bp, Unknown
  misc_feature (1)..( 13): Result.005 file - promoters50/3438171
aaataaatttttg

SEQ ID NO: 184300 - DNA, 13 bp, Unknown
  misc_feature (1)..( 13): Result.005 file - promoters50/3438171
ttatatattctgc

SEQ ID NO: 184301 - DNA, 13 bp, Unknown
  misc_feature (1)..( 13): Result.005 file - promoters50/3438171
aaaaaaattcacg

SEQ ID NO: 184302 - DNA, 13 bp, Unknown
  misc_feature (1)..( 13): Result.005 file - promoters50/3438171
aaacaaatgtttg

SEQ ID NO: 184303 - DNA, 13 bp, Unknown
  misc_feature (1)..( 13): Result.005 file - promoters50/3438171
tactgtatgttta

SEQ ID NO: 184304 - DNA, 10 bp, Unknown
  misc_feature (1)..( 10): Result.005 file - promoters50/3438171
aaattataaa

SEQ ID NO: 184305 - DNA, 10 bp, Unknown
  misc_feature (1)..( 10): Result.005 file - promoters50/3438171
aaattttaat

SEQ ID NO: 184306 - DNA, 10 bp, Unknown
  misc_feature (1)..( 10): Result.005 file - promoters50/3438171
taattttcgt

SEQ ID NO: 184307 - DNA, 10 bp, Unknown
  misc_feature (1)..( 10): Result.005 file - promoters50/3438171
tgagtttaat

SEQ ID NO: 184308 - DNA, 10 bp, Unknown
  misc_feature (1)..( 10): Result.005 file - promoters50/3438171
taatgttaac

SEQ ID NO: 184309 - DNA, 10 bp, Unknown
  misc_feature (1)..( 10): Result.005 file - promoters50/3438171
ttatttttta

SEQ ID NO: 184310 - DNA, 12 bp, Unknown
  misc_feature (1)..( 12): Result.005 file - promoters50/3438171
aaaacattgatt

SEQ ID NO: 184311 - DNA, 12 bp, Unknown
  misc_feature (1)..( 12): Result.005 file - promoters50/3438171
aaaaaattcacg

SEQ ID NO: 184312 - DNA, 13 bp, Unknown
  misc_feature (1)..( 13): Result.005 file - promoters50/3438171
aaataaatttttg

SEQ ID NO: 184313 - DNA, 13 bp, Unknown
  misc_feature (1)..( 13): Result.005 file - promoters50/3438171
acatacatatact

SEQ ID NO: 184314 - DNA, 13 bp, Unknown
  misc_feature (1)..( 13): Result.005 file - promoters50/3438171
aaacaaatgtttg

SEQ ID NO: 184315 - DNA, 13 bp, Unknown
  misc_feature (1)..( 13): Result.005 file - promoters50/3438171
tgcaaaattatat

SEQ ID NO: 184316 - DNA, 12 bp, Unknown
  misc_feature (1)..( 12): Result.005 file - promoters50/3438171
cgtaatgtttca

SEQ ID NO: 184317 - DNA, 12 bp, Unknown
  misc_feature (1)..( 12): Result.005 file - promoters50/3438171
attaatatttag

SEQ ID NO: 184318 - DNA, 12 bp, Unknown
  misc_feature (1)..( 12): Result.005 file - promoters50/3438171
cttaatctttta

SEQ ID NO: 184319 - DNA, 12 bp, Unknown
  misc_feature (1)..( 12): Result.005 file - promoters50/3438171
gataatatttca

SEQ ID NO: 184320 - DNA, 12 bp, Unknown
  misc_feature (1)..( 12): Result.005 file - promoters50/3438171
tttaatatgaag

SEQ ID NO: 184321 - DNA, 12 bp, Unknown
  misc_feature (1)..( 12): Result.005 file - promoters50/3438171
tttgatatatac

SEQ ID NO: 184322 - DNA, 13 bp, Unknown
  misc_feature (1)..( 13): Result.005 file - promoters50/3438194
aagaagcagagag

SEQ ID NO: 184323 - DNA, 13 bp, Unknown
  misc_feature (1)..( 13): Result.005 file - promoters50/3438194
acgaaacagagga

SEQ ID NO: 184324 - DNA, 13 bp, Unknown
  misc_feature (1)..( 13): Result.005 file - promoters50/3438194
atgaagcaacttc

SEQ ID NO: 184325 - DNA, 13 bp, Unknown
  misc_feature (1)..( 13): Result.005 file - promoters50/3438194
tccaaggagagag

SEQ ID NO: 184326 - DNA, 13 bp, Unknown
  misc_feature (1)..( 13): Result.005 file - promoters50/3438194
tcgaaacacacac

SEQ ID NO: 184327 - DNA, 13 bp, Unknown
  misc_feature (1)..( 13): Result.005 file - promoters50/3438194
tccatggacaagg

SEQ ID NO: 184328 - DNA, 7 bp, Unknown
  misc_feature (1)..( 7): Result.005 file - promoters50/3438208
aaacaag

SEQ ID NO: 184329 - DNA, 7 bp, Unknown
  misc_feature (1)..( 7): Result.005 file - promoters50/3438208
aaacaat

SEQ ID NO: 184330 - DNA, 7 bp, Unknown
  misc_feature (1)..( 7): Result.005 file - promoters50/3438208
aaataat

SEQ ID NO: 184331 - DNA, 8 bp, Unknown
  misc_feature (1)..( 8): Result.005 file - promoters50/3438222
attactta

SEQ ID NO: 184332 - DNA, 8 bp, Unknown
  misc_feature (1)..( 8): Result.005 file - promoters50/3438222
attaatta

SEQ ID NO: 184333 - DNA, 8 bp, Unknown
  misc_feature (1)..( 8): Result.005 file - promoters50/3438222
tttacttg

SEQ ID NO: 184334 - DNA, 9 bp, Unknown
  misc_feature (1)..( 9): Result.005 file - promoters50/3438222
tatcaaatg

SEQ ID NO: 184335 - DNA, 9 bp, Unknown
  misc_feature (1)..( 9): Result.005 file - promoters50/3438222
tattaaatt

SEQ ID NO: 184336 - DNA, 9 bp, Unknown
  misc_feature (1)..( 9): Result.005 file - promoters50/3438222
tcgtaaatt

SEQ ID NO: 184337 - DNA, 13 bp, Unknown
  misc_feature (1)..( 13): Result.005 file - promoters50/3438226
ttttaattttata

SEQ ID NO: 184338 - DNA, 13 bp, Unknown
  misc_feature (1)..( 13): Result.005 file - promoters50/3438226
tcctaatttgata

SEQ ID NO: 184339 - DNA, 13 bp, Unknown
  misc_feature (1)..( 13): Result.005 file - promoters50/3438226
aattaatttattt

SEQ ID NO: 184340 - DNA, 13 bp, Unknown
  misc_feature (1)..( 13): Result.005 file - promoters50/3438226
tgacaattttctt

SEQ ID NO: 184341 - DNA, 13 bp, Unknown
  misc_feature (1)..( 13): Result.005 file - promoters50/3438226
aattcatttaagc

SEQ ID NO: 184342 - DNA, 13 bp, Unknown
  misc_feature (1)..( 13): Result.005 file - promoters50/3438226
tatcaattgtcta

SEQ ID NO: 184343 - DNA, 12 bp, Unknown
  misc_feature (1)..( 12): Result.005 file - promoters50/3438236
aatatatatatc

SEQ ID NO: 184344 - DNA, 12 bp, Unknown
  misc_feature (1)..( 12): Result.005 file - promoters50/3438236
gttatataaatc

SEQ ID NO: 184345 - DNA, 12 bp, Unknown
  misc_feature (1)..( 12): Result.005 file - promoters50/3438236
gacatatatact

SEQ ID NO: 184346 - DNA, 12 bp, Unknown
  misc_feature (1)..( 12): Result.005 file - promoters50/3438236
cttatttatgaa

SEQ ID NO: 184347 - DNA, 12 bp, Unknown
  misc_feature (1)..( 12): Result.005 file - promoters50/3438236
gttttatactca

SEQ ID NO: 184348 - DNA, 12 bp, Unknown
  misc_feature (1)..( 12): Result.005 file - promoters50/3438236
tatatataagta

SEQ ID NO: 184349 - DNA, 14 bp, Unknown
  misc_feature (1)..( 14): Result.005 file - promoters50/3438236
caaaagaatcagtg

SEQ ID NO: 184350 - DNA, 14 bp, Unknown
  misc_feature (1)..( 14): Result.005 file - promoters50/3438236
tcaaataattctcc

SEQ ID NO: 184351 - DNA, 14 bp, Unknown
  misc_feature (1)..( 14): Result.005 file - promoters50/3438236
caaaacaattcaag

SEQ ID NO: 184352 - DNA, 14 bp, Unknown
  misc_feature (1)..( 14): Result.005 file - promoters50/3438236
gattatatttcttg

SEQ ID NO: 184353 - DNA, 14 bp, Unknown
  misc_feature (1)..( 14): Result.005 file - promoters50/3438236
acttgtttttcttg

SEQ ID NO: 184354 - DNA, 14 bp, Unknown
  misc_feature (1)..( 14): Result.005 file - promoters50/3438236
tcaattaatctttt

SEQ ID NO: 184355 - DNA, 19 bp, Unknown
  misc_feature (1)..( 19): Result.005 file - promoters50/3438236
ggcccatttattcaatcca

SEQ ID NO: 184356 - DNA, 19 bp, Unknown
  misc_feature (1)..( 19): Result.005 file - promoters50/3438236
ctagcatttattcctcttt

SEQ ID NO: 184357 - DNA, 19 bp, Unknown
  misc_feature (1)..( 19): Result.005 file - promoters50/3438236
ggcctatttgtgatgggcc

SEQ ID NO: 184358 - DNA, 19 bp, Unknown
  misc_feature (1)..( 19): Result.005 file - promoters50/3438236
cattttcttatgcaaagcc

SEQ ID NO: 184359 - DNA, 19 bp, Unknown
  misc_feature (1)..( 19): Result.005 file - promoters50/3438236
ttagtattttcttgcatta

SEQ ID NO: 184360 - DNA, 19 bp, Unknown
  misc_feature (1)..( 19): Result.005 file - promoters50/3438236
gcatacaaattgctaagcc

SEQ ID NO: 184361 - DNA, 10 bp, Unknown
  misc_feature (1)..( 10): Result.005 file - promoters50/3438291
aaattgatct

SEQ ID NO: 184362 - DNA, 10 bp, Unknown
  misc_feature (1)..( 10): Result.005 file - promoters50/3438291
aaattcatct

SEQ ID NO: 184363 - DNA, 10 bp, Unknown
  misc_feature (1)..( 10): Result.005 file - promoters50/3438291
aaattgtctt

SEQ ID NO: 184364 - DNA, 9 bp, Unknown
  misc_feature (1)..( 9): Result.005 file - promoters50/3438291
taaaaacaa

SEQ ID NO: 184365 - DNA, 9 bp, Unknown
  misc_feature (1)..( 9): Result.005 file - promoters50/3438291
taaaatcaa

SEQ ID NO: 184366 - DNA, 9 bp, Unknown
  misc_feature (1)..( 9): Result.005 file - promoters50/3438291
caaattcat

SEQ ID NO: 184367 - DNA, 30 bp, Unknown
  misc_feature (1)..( 30): Result.005 file - promoters50/3438312
acgtgtcattttattattagctattgcttc

SEQ ID NO: 184368 - DNA, 30 bp, Unknown; identical to SEQ ID NO: 71939
  misc_feature (1)..( 30): Result.005 file - promoters50/3438312

SEQ ID NO: 184369 - DNA, 30 bp, Unknown
  misc_feature (1)..( 30): Result.005 file - promoters50/3438312
acgtgtcaagctttggttggttattgcttc

SEQ ID NO: 184370 - DNA, 15 bp, Unknown
  misc_feature (1)..( 15): Result.005 file - promoters50/3438312
cgccttagctttctc

SEQ ID NO: 184371 - DNA, 15 bp, Unknown
  misc_feature (1)..( 15): Result.005 file - promoters50/3438312
cgccttagctttctc

SEQ ID NO: 184372 - DNA, 15 bp, Unknown
  misc_feature (1)..( 15): Result.005 file - promoters50/3438312
cgccttagctttctc

SEQ ID NO: 184373 - DNA, 22 bp, Unknown
  misc_feature (1)..( 22): Result.005 file - promoters50/3438312
gacctagtcgtcctcgtctttt

SEQ ID NO: 184374 - DNA, 22 bp, Unknown
  misc_feature (1)..( 22): Result.005 file - promoters50/3438312
gaccgagtcgtcctcgtctttt

SEQ ID NO: 184375 - DNA, 22 bp, Unknown
  misc_feature (1)..( 22): Result.005 file - promoters50/3438312
gaccgactcgtcctcgtctttt

SEQ ID NO: 184376 - DNA, 20 bp, Unknown
  misc_feature (1)..( 20): Result.005 file - promoters50/3438312
ttcttcttctataaaacaat

SEQ ID NO: 184377 - DNA, 20 bp, Unknown
  misc_feature (1)..( 20): Result.005 file - promoters50/3438312
ttttgcttctataaatcaaa

SEQ ID NO: 184378 - DNA, 20 bp, Unknown
  misc_feature (1)..( 20): Result.005 file - promoters50/3438312
gatctttgccggaaaacaat

SEQ ID NO: 184379 - DNA, 20 bp, Unknown
  misc_feature (1)..( 20): Result.005 file - promoters50/3438312
ttcttcttctataaattaat

SEQ ID NO: 184380 - DNA, 9 bp, Unknown
  misc_feature (1)..( 9): Result.005 file - promoters50/3438312
aaaaaaaac

SEQ ID NO: 184381 - DNA, 9 bp, Unknown
  misc_feature (1)..( 9): Result.005 file - promoters50/3438312
gaaaacaac

SEQ ID NO: 184382 - DNA, 9 bp, Unknown
  misc_feature (1)..( 9): Result.005 file - promoters50/3438312
caataaaac

SEQ ID NO: 184383 - DNA, 22 bp, Unknown
  misc_feature (1)..( 22): Result.005 file - promoters50/3438312
gacctagtcgtcctcgtctttt

SEQ ID NO: 184384 - DNA, 22 bp, Unknown
  misc_feature (1)..( 22): Result.005 file - promoters50/3438312
tctcgtgaccgactcgtcctcg

SEQ ID NO: 184385 - DNA, 22 bp, Unknown
  misc_feature (1)..( 22): Result.005 file - promoters50/3438312
gaccgagtcgtcctcgtctttt

SEQ ID NO: 184386 - DNA, 8 bp, Unknown
  misc_feature (1)..( 8): Result.005 file - promoters50/3438312
ttcttgcc

SEQ ID NO: 184387 - DNA, 8 bp, Unknown
  misc_feature (1)..( 8): Result.005 file - promoters50/3438312
gtcttgcg

SEQ ID NO: 184388 - DNA, 8 bp, Unknown
  misc_feature (1)..( 8): Result.005 file - promoters50/3438312
ttctggcc

SEQ ID NO: 184389 - DNA, 12 bp, Unknown
  misc_feature (1)..( 12): Result.005 file - promoters50/3438369
aagtatataata

SEQ ID NO: 184390 - DNA, 12 bp, Unknown
  misc_feature (1)..( 12): Result.005 file - promoters50/3438369
caaaataaaatt

SEQ ID NO: 184391 - DNA, 12 bp, Unknown
  misc_feature (1)..( 12): Result.005 file - promoters50/3438369
aagtatttaaaa

SEQ ID NO: 184392 - DNA, 12 bp, Unknown
  misc_feature (1)..( 12): Result.005 file - promoters50/3438369
gaagaaagaaat

SEQ ID NO: 184393 - DNA, 12 bp, Unknown
  misc_feature (1)..( 12): Result.005 file - promoters50/3438369
taggaatgaaga

SEQ ID NO: 184394 - DNA, 12 bp, Unknown
  misc_feature (1)..( 12): Result.005 file - promoters50/3438369
aataaatgaaat

SEQ ID NO: 184395 - DNA, 10 bp, Unknown
  misc_feature (1)..( 10): Result.005 file - promoters50/3438369
aaaatatttt

SEQ ID NO: 184396 - DNA, 10 bp, Unknown
  misc_feature (1)..( 10): Result.005 file - promoters50/3438369
gaaagattca

SEQ ID NO: 184397 - DNA, 10 bp, Unknown
  misc_feature (1)..( 10): Result.005 file - promoters50/3438369
aaaatatttt

SEQ ID NO: 184398 - DNA, 10 bp, Unknown
  misc_feature (1)..( 10): Result.005 file - promoters50/3438369
caaatataaa

SEQ ID NO: 184399 - DNA, 10 bp, Unknown
  misc_feature (1)..( 10): Result.005 file - promoters50/3438369
ggaatctaag

SEQ ID NO: 184400 - DNA, 11 bp, Unknown
  misc_feature (1)..( 11): Result.005 file - promoters50/3438381
ttctacatcca

SEQ ID NO: 184401 - DNA, 11 bp, Unknown
  misc_feature (1)..( 11): Result.005 file - promoters50/3438381
cctcacagcca

SEQ ID NO: 184402 - DNA, 11 bp, Unknown
  misc_feature (1)..( 11): Result.005 file - promoters50/3438381
ttctaaatcag

SEQ ID NO: 184403 - DNA, 14 bp, Unknown
  misc_feature (1)..( 14): Result.005 file - promoters50/3438420
aaatgtaaaattat

SEQ ID NO: 184404 - DNA, 14 bp, Unknown
  misc_feature (1)..( 14): Result.005 file - promoters50/3438420
aaacgtataatatg

SEQ ID NO: 184405 - DNA, 14 bp, Unknown
  misc_feature (1)..( 14): Result.005 file - promoters50/3438420
aacaaaataataag

SEQ ID NO: 184406 - DNA, 14 bp, Unknown
  misc_feature (1)..( 14): Result.005 file - promoters50/3438420
aggaataaaatgga

SEQ ID NO: 184407 - DNA, 14 bp, Unknown
  misc_feature (1)..( 14): Result.005 file - promoters50/3438420
accggttcaataaa

SEQ ID NO: 184408 - DNA, 14 bp, Unknown
  misc_feature (1)..( 14): Result.005 file - promoters50/3438420
aagtcactaaccaa

SEQ ID NO: 184409 - DNA, 14 bp, Unknown
  misc_feature (1)..( 14): Result.005 file - promoters50/3438420
tcaccaataattgt

SEQ ID NO: 184410 - DNA, 11 bp, Unknown
  misc_feature (1)..( 11): Result.005 file - promoters50/3438420
agaacaaaata

SEQ ID NO: 184411 - DNA, 11 bp, Unknown
  misc_feature (1)..( 11): Result.005 file - promoters50/3438420
ggaataaaatg

SEQ ID NO: 184412 - DNA, 11 bp, Unknown
  misc_feature (1)..( 11): Result.005 file - promoters50/3438420
cgtataatatg

SEQ ID NO: 184413 - DNA, 11 bp, Unknown
  misc_feature (1)..( 11): Result.005 file - promoters50/3438420
tcaataaacca

SEQ ID NO: 184414 - DNA, 11 bp, Unknown
  misc_feature (1)..( 11): Result.005 file - promoters50/3438420
tcactaaccaa

SEQ ID NO: 184415 - DNA, 11 bp, Unknown
  misc_feature (1)..( 11): Result.005 file - promoters50/3438420
ccaataattgt

SEQ ID NO: 184416 - DNA, 8 bp, Unknown
  misc_feature (1)..( 8): Result.005 file - promoters50/3438479
cgttatct

SEQ ID NO: 184417 - DNA, 8 bp, Unknown
  misc_feature (1)..( 8): Result.005 file - promoters50/3438479
cgttatac

SEQ ID NO: 184418 - DNA, 8 bp, Unknown
  misc_feature (1)..( 8): Result.005 file - promoters50/3438479
ggttttct

SEQ ID NO: 184419 - DNA, 9 bp, Unknown
  misc_feature (1)..( 9): Result.005 file - promoters50/3438494
ccttataaa

SEQ ID NO: 184420 - DNA, 9 bp, Unknown
  misc_feature (1)..( 9): Result.005 file - promoters50/3438494
atatataaa

SEQ ID NO: 184421 - DNA, 9 bp, Unknown
  misc_feature (1)..( 9): Result.005 file - promoters50/3438494
atctataaa

SEQ ID NO: 184422 - DNA, 9 bp, Unknown
  misc_feature (1)..( 9): Result.005 file - promoters50/3438494
atatataaa

SEQ ID NO: 184423 - DNA, 9 bp, Unknown
  misc_feature (1)..( 9): Result.005 file - promoters50/3438494
ccttttaaa

SEQ ID NO: 184424 - DNA, 10 bp, Unknown
  misc_feature (1)..( 10): Result.005 file - promoters50/3438494
cctttaagtt

SEQ ID NO: 184425 - DNA, 10 bp, Unknown
  misc_feature (1)..( 10): Result.005 file - promoters50/3438494
aatttgagtt

SEQ ID NO: 184426 - DNA, 10 bp, Unknown
  misc_feature (1)..( 10): Result.005 file - promoters50/3438494
atttttagta

SEQ ID NO: 184427 - DNA, 10 bp, Unknown
  misc_feature (1)..( 10): Result.005 file - promoters50/3438494
aatgtgattg

SEQ ID NO: 184428 - DNA, 8 bp, Unknown
  misc_feature (1)..( 8): Result.005 file - promoters50/3438505
tacgcata

SEQ ID NO: 184429 - DNA, 8 bp, Unknown
  misc_feature (1)..( 8): Result.005 file - promoters50/3438505
tacccata

SEQ ID NO: 184430 - DNA, 8 bp, Unknown
  misc_feature (1)..( 8): Result.005 file - promoters50/3438505
ggcacatg

SEQ ID NO: 184431 - DNA, 6 bp, Unknown
  misc_feature (1)..( 6): Result.005 file - promoters50/3438505
cgacat

SEQ ID NO: 184432 - DNA, 6 bp, Unknown
  misc_feature (1)..( 6): Result.005 file - promoters50/3438505
cgacat

SEQ ID NO: 184433 - DNA, 6 bp, Unknown
  misc_feature (1)..( 6): Result.005 file - promoters50/3438505
cgacat

SEQ ID NO: 184434 - DNA, 7 bp, Unknown
  misc_feature (1)..( 7): Result.005 file - promoters50/3438505
gtttctt

SEQ ID NO: 184435 - DNA, 7 bp, Unknown
  misc_feature (1)..( 7): Result.005 file - promoters50/3438505
gttcctt

SEQ ID NO: 184436 - DNA, 7 bp, Unknown
  misc_feature (1)..( 7): Result.005 file - promoters50/3438505
gttcctc

SEQ ID NO: 184437 - DNA, 8 bp, Unknown
  misc_feature (1)..( 8): Result.005 file - promoters50/3438505
gttgatga

SEQ ID NO: 184438 - DNA, 8 bp, Unknown
  misc_feature (1)..( 8): Result.005 file - promoters50/3438505
gttgattc

SEQ ID NO: 184439 - DNA, 8 bp, Unknown
  misc_feature (1)..( 8): Result.005 file - promoters50/3438505
cttgattc

SEQ ID NO: 184440 - DNA, 12 bp, Unknown
  misc_feature (1)..( 12): Result.005 file - promoters50/3438512
caataatttaca

SEQ ID NO: 184441 - DNA, 12 bp, Unknown
  misc_feature (1)..( 12): Result.005 file - promoters50/3438512
tgaaaatttata

SEQ ID NO: 184442 - DNA, 12 bp, Unknown
  misc_feature (1)..( 12): Result.005 file - promoters50/3438512
gtataattttat

SEQ ID NO: 184443 - DNA, 12 bp, Unknown
  misc_feature (1)..( 12): Result.005 file - promoters50/3438512
caacaatgtaca

SEQ ID NO: 184444 - DNA, 12 bp, Unknown
  misc_feature (1)..( 12): Result.005 file - promoters50/3438512
taaaaatttttc

SEQ ID NO: 184445 - DNA, 12 bp, Unknown
  misc_feature (1)..( 12): Result.005 file - promoters50/3438512
ctatgatttctt

SEQ ID NO: 184446 - DNA, 15 bp, Unknown
  misc_feature (1)..( 15): Result.005 file - promoters50/3438512
tgagtatattttata

SEQ ID NO: 184447 - DNA, 15 bp, Unknown
  misc_feature (1)..( 15): Result.005 file - promoters50/3438512
tttgtaaattttgca

SEQ ID NO: 184448 - DNA, 15 bp, Unknown
  misc_feature (1)..( 15): Result.005 file - promoters50/3438512
tgattatatgtacaa

SEQ ID NO: 184449 - DNA, 15 bp, Unknown
  misc_feature (1)..( 15): Result.005 file - promoters50/3438512
ttacactatttgata

SEQ ID NO: 184450 - DNA, 15 bp, Unknown
  misc_feature (1)..( 15): Result.005 file - promoters50/3438512
gatgtaaaaattata

SEQ ID NO: 184451 - DNA, 15 bp, Unknown
  misc_feature (1)..( 15): Result.005 file - promoters50/3438512
tatctatatgcagaa

SEQ ID NO: 184452 - DNA, 12 bp, Unknown
  misc_feature (1)..( 12): Result.005 file - promoters50/3438512
ggaaaaaaataa

SEQ ID NO: 184453 - DNA, 12 bp, Unknown
  misc_feature (1)..( 12): Result.005 file - promoters50/3438512
tcaaaaaaaaaa

SEQ ID NO: 184454 - DNA, 12 bp, Unknown
  misc_feature (1)..( 12): Result.005 file - promoters50/3438512
acaaaaaataat

SEQ ID NO: 184455 - DNA, 12 bp, Unknown
  misc_feature (1)..( 12): Result.005 file - promoters50/3438512
acaaaacaattc

SEQ ID NO: 184456 - DNA, 12 bp, Unknown
  misc_feature (1)..( 12): Result.005 file - promoters50/3438512
tagaaacaatgt

SEQ ID NO: 184457 - DNA, 12 bp, Unknown
  misc_feature (1)..( 12): Result.005 file - promoters50/3438512
tcaataaactta

SEQ ID NO: 184458 - DNA, 12 bp, Unknown
  misc_feature (1)..( 12): Result.005 file - promoters50/3438512
tcaaaataaaaa

SEQ ID NO: 184459 - DNA, 9 bp, Unknown
  misc_feature (1)..( 9): Result.005 file - promoters50/3438512
atgtttaat

SEQ ID NO: 184460 - DNA, 9 bp, Unknown
  misc_feature (1)..( 9): Result.005 file - promoters50/3438512
ttgtttata

SEQ ID NO: 184461 - DNA, 9 bp, Unknown
  misc_feature (1)..( 9): Result.005 file - promoters50/3438512
atgtttgat

SEQ ID NO: 184462 - DNA, 9 bp, Unknown
  misc_feature (1)..( 9): Result.005 file - promoters50/3438512
gagttcata

SEQ ID NO: 184463 - DNA, 9 bp, Unknown
  misc_feature (1)..( 9): Result.005 file - promoters50/3438512
ttgcttaca

SEQ ID NO: 184464 - DNA, 9 bp, Unknown
  misc_feature (1)..( 9): Result.005 file - promoters50/3438512
atgttttta

SEQ ID NO: 184465 - DNA, 10 bp, Unknown
  misc_feature (1)..( 10): Result.005 file - promoters50/3438512
tactttttag

SEQ ID NO: 184466 - DNA, 10 bp, Unknown
  misc_feature (1)..( 10): Result.005 file - promoters50/3438512
tacttttttt

SEQ ID NO: 184467 - DNA, 10 bp, Unknown
  misc_feature (1)..( 10): Result.005 file - promoters50/3438512
atgtttttac

SEQ ID NO: 184468 - DNA, 10 bp, Unknown
  misc_feature (1)..( 10): Result.005 file - promoters50/3438512
gtctttgctt

SEQ ID NO: 184469 - DNA, 11 bp, Unknown
  misc_feature (1)..( 11): Result.005 file - promoters50/3438512
aagttgtttat

SEQ ID NO: 184470 - DNA, 11 bp, Unknown
  misc_feature (1)..( 11): Result.005 file - promoters50/3438512
tgtttttgctg

SEQ ID NO: 184471 - DNA, 12 bp, Unknown
  misc_feature (1)..( 12): Result.005 file - promoters50/3438512
tcataaagcact

SEQ ID NO: 184472 - DNA, 12 bp, Unknown
  misc_feature (1)..( 12): Result.005 file - promoters50/3438512
tcaaaaatactt

SEQ ID NO: 184473 - DNA, 12 bp, Unknown
  misc_feature (1)..( 12): Result.005 file - promoters50/3438512
tcataatattag

SEQ ID NO: 184474 - DNA, 12 bp, Unknown
  misc_feature (1)..( 12): Result.005 file - promoters50/3438512
aaaaaaatcatt

SEQ ID NO: 184475 - DNA, 12 bp, Unknown
  misc_feature (1)..( 12): Result.005 file - promoters50/3438512
gtaaaaattata

SEQ ID NO: 184476 - DNA, 12 bp, Unknown
  misc_feature (1)..( 12): Result.005 file - promoters50/3438512
gataaaataaat

SEQ ID NO: 184477 - DNA, 10 bp, Unknown
  misc_feature (1)..( 10): Result.005 file - promoters50/3438518
ttgtataaaa

SEQ ID NO: 184478 - DNA, 10 bp, Unknown
  misc_feature (1)..( 10): Result.005 file - promoters50/3438518
gtgtataaat

SEQ ID NO: 184479 - DNA, 10 bp, Unknown
  misc_feature (1)..( 10): Result.005 file - promoters50/3438518
gtttataaaa

SEQ ID NO: 184480 - DNA, 10 bp, Unknown
  misc_feature (1)..( 10): Result.005 file - promoters50/3438518
ttatatatag

SEQ ID NO: 184481 - DNA, 10 bp, Unknown
  misc_feature (1)..( 10): Result.005 file - promoters50/3438518
ctatatatat

SEQ ID NO: 184482 - DNA, 10 bp, Unknown
  misc_feature (1)..( 10): Result.005 file - promoters50/3438518
ttatatcaac

SEQ ID NO: 184483 - DNA, 9 bp, Unknown
  misc_feature (1)..( 9): Result.005 file - promoters50/3438594
aatcaattt

SEQ ID NO: 184484 - DNA, 9 bp, Unknown
  misc_feature (1)..( 9): Result.005 file - promoters50/3438594
aattaatta

SEQ ID NO: 184485 - DNA, 9 bp, Unknown
  misc_feature (1)..( 9): Result.005 file - promoters50/3438594
gctcacttt

SEQ ID NO: 184486 - DNA, 9 bp, Unknown
  misc_feature (1)..( 9): Result.005 file - promoters50/3438594
cgttattta

SEQ ID NO: 184487 - DNA, 9 bp, Unknown
  misc_feature (1)..( 9): Result.005 file - promoters50/3438594
atctaatta

SEQ ID NO: 184488 - DNA, 9 bp, Unknown
  misc_feature (1)..( 9): Result.005 file - promoters50/3438594
tactattta

SEQ ID NO: 184489 - DNA, 10 bp, Unknown
  misc_feature (1)..( 10): Result.005 file - promoters50/3438594
tgaattaaat

SEQ ID NO: 184490 - DNA, 10 bp, Unknown
  misc_feature (1)..( 10): Result.005 file - promoters50/3438594
aaaataaaaa

SEQ ID NO: 184491 - DNA, 10 bp, Unknown
  misc_feature (1)..( 10): Result.005 file - promoters50/3438594
tctataaaaa

SEQ ID NO: 184492 - DNA, 10 bp, Unknown
  misc_feature (1)..( 10): Result.005 file - promoters50/3438594
taaacaaaag

SEQ ID NO: 184493 - DNA, 10 bp, Unknown
  misc_feature (1)..( 10): Result.005 file - promoters50/3438594
aaaagaaaaa

SEQ ID NO: 184494 - DNA, 10 bp, Unknown
  misc_feature (1)..( 10): Result.005 file - promoters50/3438594
ggtattaaaa

SEQ ID NO: 184495 - DNA, 10 bp, Unknown
  misc_feature (1)..( 10): Result.005 file - promoters50/3438594
aaaagaaaat

SEQ ID NO: 184496 - DNA, 10 bp, Unknown
  misc_feature (1)..( 10): Result.005 file - promoters50/3438594
ataagtaaac

SEQ ID NO: 184497 - DNA, 10 bp, Unknown
  misc_feature (1)..( 10): Result.005 file - promoters50/3438594
aaaagaaatg

SEQ ID NO: 184498 - DNA, 10 bp, Unknown
  misc_feature (1)..( 10): Result.005 file - promoters50/3438594
agtggaaaat

SEQ ID NO: 184499 - DNA, 10 bp, Unknown
  misc_feature (1)..( 10): Result.005 file - promoters50/3438594
taaacaaaag

SEQ ID NO: 184500 - DNA, 10 bp, Unknown
  misc_feature (1)..( 10): Result.005 file - promoters50/3438594
aaaagaaaaa

SEQ ID NO: 184501 - DNA, 9 bp, Unknown
  misc_feature (1)..( 9): Result.005 file - promoters50/3438594
caaaaataa

SEQ ID NO: 184502 - DNA, 9 bp, Unknown
  misc_feature (1)..( 9): Result.005 file - promoters50/3438594
tagaaataa

SEQ ID NO: 184503 - DNA, 9 bp, Unknown
  misc_feature (1)..( 9): Result.005 file - promoters50/3438594
gccaaataa

SEQ ID NO: 184504 - DNA, 9 bp, Unknown
  misc_feature (1)..( 9): Result.005 file - promoters50/3438594
ccaaaatat

SEQ ID NO: 184505 - DNA, 10 bp, Unknown
  misc_feature (1)..( 10): Result.005 file - promoters50/3438594
tcaaaactaa

SEQ ID NO: 184506 - DNA, 10 bp, Unknown
  misc_feature (1)..( 10): Result.005 file - promoters50/3438594
gctaaattat

SEQ ID NO: 184507 - DNA, 10 bp, Unknown
  misc_feature (1)..( 10): Result.005 file - promoters50/3438594
acaaatctat

SEQ ID NO: 184508 - DNA, 10 bp, Unknown
  misc_feature (1)..( 10): Result.005 file - promoters50/3438594
tgcaaccaaa

SEQ ID NO: 184509 - DNA, 12 bp, Unknown
  misc_feature (1)..( 12): Result.005 file - promoters50/3438594
taaaaacttctt

SEQ ID NO: 184510 - DNA, 12 bp, Unknown
  misc_feature (1)..( 12): Result.005 file - promoters50/3438594
acaaaacttcgt

SEQ ID NO: 184511 - DNA, 13 bp, Unknown
  misc_feature (1)..( 13): Result.005 file - promoters50/3438594
ctaaaaccttttg

SEQ ID NO: 184512 - DNA, 13 bp, Unknown
  misc_feature (1)..( 13): Result.005 file - promoters50/3438594
accaaaacttctt

SEQ ID NO: 184513 - DNA, 13 bp, Unknown
  misc_feature (1)..( 13): Result.005 file - promoters50/3438594
ttaaaaacttctt

SEQ ID NO: 184514 - DNA, 13 bp, Unknown
  misc_feature (1)..( 13): Result.005 file - promoters50/3438594
ttaaaaataaact

SEQ ID NO: 184515 - DNA, 13 bp, Unknown
  misc_feature (1)..( 13): Result.005 file - promoters50/3438594
ttaataattcgtt

SEQ ID NO: 184516 - DNA, 15 bp, Unknown
  misc_feature (1)..( 15): Result.005 file - promoters50/3438594
tgaaagtatgttttt

SEQ ID NO: 184517 - DNA, 15 bp, Unknown
  misc_feature (1)..( 15): Result.005 file - promoters50/3438594
acttcatatgtattt

SEQ ID NO: 184518 - DNA, 15 bp, Unknown
  misc_feature (1)..( 15): Result.005 file - promoters50/3438594
aattattttgtattc

SEQ ID NO: 184519 - DNA, 15 bp, Unknown
  misc_feature (1)..( 15): Result.005 file - promoters50/3438594
tttgtttacgttttt

SEQ ID NO: 184520 - DNA, 15 bp, Unknown
  misc_feature (1)..( 15): Result.005 file - promoters50/3438594
aattattctgtttct

SEQ ID NO: 184521 - DNA, 15 bp, Unknown
  misc_feature (1)..( 15): Result.005 file - promoters50/3438594
cgtgtctaattatac

SEQ ID NO: 184522 - DNA, 8 bp, Unknown
  misc_feature (1)..( 8): Result.005 file - promoters50/3438594
caatttat

SEQ ID NO: 184523 - DNA, 8 bp, Unknown
  misc_feature (1)..( 8): Result.005 file - promoters50/3438594
ttatttat

SEQ ID NO: 184524 - DNA, 8 bp, Unknown
  misc_feature (1)..( 8): Result.005 file - promoters50/3438594
ttaattaa

SEQ ID NO: 184525 - DNA, 8 bp, Unknown
  misc_feature (1)..( 8): Result.005 file - promoters50/3438594
ctaattag

SEQ ID NO: 184526 - DNA, 8 bp, Unknown
  misc_feature (1)..( 8): Result.005 file - promoters50/3438594
ctatttag

SEQ ID NO: 184527 - DNA, 8 bp, Unknown
  misc_feature (1)..( 8): Result.005 file - promoters50/3438594
ctatttgg

SEQ ID NO: 184528 - DNA, 11 bp, Unknown
  misc_feature (1)..( 11): Result.005 file - promoters50/3438594
ggaaaaacttt

SEQ ID NO: 184529 - DNA, 11 bp, Unknown
  misc_feature (1)..( 11): Result.005 file - promoters50/3438594
ctaaaaccttt

SEQ ID NO: 184530 - DNA, 11 bp, Unknown
  misc_feature (1)..( 11): Result.005 file - promoters50/3438594
accaaaacttc

SEQ ID NO: 184531 - DNA, 11 bp, Unknown
  misc_feature (1)..( 11): Result.005 file - promoters50/3438594
ttaaaaacttc

SEQ ID NO: 184532 - DNA, 11 bp, Unknown
  misc_feature (1)..( 11): Result.005 file - promoters50/3438594
ttaaaaataaa

SEQ ID NO: 184533 - DNA, 11 bp, Unknown
  misc_feature (1)..( 11): Result.005 file - promoters50/3438594
ttaataattcg

SEQ ID NO: 184534 - DNA, 8 bp, Unknown
  misc_feature (1)..( 8): Result.005 file - promoters50/3438624
ggttgtgc

SEQ ID NO: 184535 - DNA, 8 bp, Unknown
  misc_feature (1)..( 8): Result.005 file - promoters50/3438624
tgttttgc

SEQ ID NO: 184536 - DNA, 8 bp, Unknown
  misc_feature (1)..( 8): Result.005 file - promoters50/3438624
tgtttttc

SEQ ID NO: 184537 - DNA, 8 bp, Unknown
  misc_feature (1)..( 8): Result.005 file - promoters50/3438624
acaaaatt

SEQ ID NO: 184538 - DNA, 8 bp, Unknown
  misc_feature (1)..( 8): Result.005 file - promoters50/3438624
aaaaaatt

SEQ ID NO: 184539 - DNA, 8 bp, Unknown
  misc_feature (1)..( 8): Result.005 file - promoters50/3438624
aaaaaatg

SEQ ID NO: 184540 - DNA, 9 bp, Unknown
  misc_feature (1)..( 9): Result.005 file - promoters50/3438632
gaaatagat

SEQ ID NO: 184541 - DNA, 9 bp, Unknown
  misc_feature (1)..( 9): Result.005 file - promoters50/3438632
cgtatagat

SEQ ID NO: 184542 - DNA, 9 bp, Unknown
  misc_feature (1)..( 9): Result.005 file - promoters50/3438632
gaaaaagag

SEQ ID NO: 184543 - DNA, 9 bp, Unknown
  misc_feature (1)..( 9): Result.005 file - promoters50/3438632
gagaaaatt

SEQ ID NO: 184544 - DNA, 9 bp, Unknown
  misc_feature (1)..( 9): Result.005 file - promoters50/3438632
gggaaaatg

SEQ ID NO: 184545 - DNA, 9 bp, Unknown
  misc_feature (1)..( 9): Result.005 file - promoters50/3438632
aatatagag

SEQ ID NO: 184546 - DNA, 10 bp, Unknown
  misc_feature (1)..( 10): Result.005 file - promoters50/3438634
catttaaaac

SEQ ID NO: 184547 - DNA, 10 bp, Unknown
  misc_feature (1)..( 10): Result.005 file - promoters50/3438634
tattcaaaac

SEQ ID NO: 184548 - DNA, 10 bp, Unknown
  misc_feature (1)..( 10): Result.005 file - promoters50/3438634
tatccaatat

SEQ ID NO: 184549 - DNA, 12 bp, Unknown
  misc_feature (1)..( 12): Result.005 file - promoters50/3438648
ttacataagttt

SEQ ID NO: 184550 - DNA, 12 bp, Unknown
  misc_feature (1)..( 12): Result.005 file - promoters50/3438648
caacagaaggtc

SEQ ID NO: 184551 - DNA, 12 bp, Unknown
  misc_feature (1)..( 12): Result.005 file - promoters50/3438648
aaacagaaaaaa

SEQ ID NO: 184552 - DNA, 12 bp, Unknown
  misc_feature (1)..( 12): Result.005 file - promoters50/3438648
aaactgaaacaa

SEQ ID NO: 184553 - DNA, 12 bp, Unknown
  misc_feature (1)..( 12): Result.005 file - promoters50/3438648
aaagagagccaa

SEQ ID NO: 184554 - DNA, 12 bp, Unknown
  misc_feature (1)..( 12): Result.005 file - promoters50/3438648
tggcagaaaaaa

SEQ ID NO: 184555 - DNA, 10 bp, Unknown
  misc_feature (1)..( 10): Result.005 file - promoters50/3438648
gaaaaaaata

SEQ ID NO: 184556 - DNA, 10 bp, Unknown
  misc_feature (1)..( 10): Result.005 file - promoters50/3438648
ataaaaaatt

SEQ ID NO: 184557 - DNA, 11 bp, Unknown
  misc_feature (1)..( 11): Result.005 file - promoters50/3438648
agaagaaaacg

SEQ ID NO: 184558 - DNA, 11 bp, Unknown
  misc_feature (1)..( 11): Result.005 file - promoters50/3438648
ttataaaaaca

SEQ ID NO: 184559 - DNA, 11 bp, Unknown
  misc_feature (1)..( 11): Result.005 file - promoters50/3438648
aaatacaaact

SEQ ID NO: 184560 - DNA, 11 bp, Unknown
  misc_feature (1)..( 11): Result.005 file - promoters50/3438648
gaagaaaaaca

SEQ ID NO: 184561 - DNA, 11 bp, Unknown
  misc_feature (1)..( 11): Result.005 file - promoters50/3438648
aagagaagaga

SEQ ID NO: 184562 - DNA, 12 bp, Unknown
  misc_feature (1)..( 12): Result.005 file - promoters50/3438648
aatgaaaattac

SEQ ID NO: 184563 - DNA, 12 bp, Unknown
  misc_feature (1)..( 12): Result.005 file - promoters50/3438648
cggaaaaaatac

SEQ ID NO: 184564 - DNA, 12 bp, Unknown
  misc_feature (1)..( 12): Result.005 file - promoters50/3438648
attgaaaattta

SEQ ID NO: 184565 - DNA, 13 bp, Unknown
  misc_feature (1)..( 13): Result.005 file - promoters50/3438648
tttaaaagaatgg

SEQ ID NO: 184566 - DNA, 13 bp, Unknown
  misc_feature (1)..( 13): Result.005 file - promoters50/3438648
ttggaaagagcaa

SEQ ID NO: 184567 - DNA, 13 bp, Unknown
  misc_feature (1)..( 13): Result.005 file - promoters50/3438648
agtgaaaacatcg

SEQ ID NO: 184568 - DNA, 14 bp, Unknown
  misc_feature (1)..( 14): Result.005 file - promoters50/3438771
aaaaataaaatatg

SEQ ID NO: 184569 - DNA, 14 bp, Unknown
  misc_feature (1)..( 14): Result.005 file - promoters50/3438771
ccaaaaaaaataaa

SEQ ID NO: 184570 - DNA, 14 bp, Unknown
  misc_feature (1)..( 14): Result.005 file - promoters50/3438771
tttaataaactgta

SEQ ID NO: 184571 - DNA, 14 bp, Unknown
  misc_feature (1)..( 14): Result.005 file - promoters50/3438771
ccaaaaaccccagt

SEQ ID NO: 184572 - DNA, 14 bp, Unknown
  misc_feature (1)..( 14): Result.005 file - promoters50/3438771
acaaaaagaactaa

SEQ ID NO: 184573 - DNA, 14 bp, Unknown
  misc_feature (1)..( 14): Result.005 file - promoters50/3438771
ctaaaacaaatcat

SEQ ID NO: 184574 - DNA, 14 bp, Unknown
  misc_feature (1)..( 14): Result.005 file - promoters50/3438771
ttaaaaaaaaaaaa

SEQ ID NO: 184575 - DNA, 8 bp, Unknown
  misc_feature (1)..( 8): Result.005 file - promoters50/3438785
attaatga

SEQ ID NO: 184576 - DNA, 8 bp, Unknown
  misc_feature (1)..( 8): Result.005 file - promoters50/3438785
attagtga

SEQ ID NO: 184577 - DNA, 8 bp, Unknown
  misc_feature (1)..( 8): Result.005 file - promoters50/3438785
tttagtgc

SEQ ID NO: 184578 - DNA, 11 bp, Unknown
  misc_feature (1)..( 11): Result.005 file - promoters50/3438919
ctttaatcaaa

SEQ ID NO: 184579 - DNA, 11 bp, Unknown
  misc_feature (1)..( 11): Result.005 file - promoters50/3438919
atttcatctga

SEQ ID NO: 184580 - DNA, 11 bp, Unknown
  misc_feature (1)..( 11): Result.005 file - promoters50/3438919
gtttaaacaat

SEQ ID NO: 184581 - DNA, 11 bp, Unknown
  misc_feature (1)..( 11): Result.005 file - promoters50/3438919
gaataaacaaa

SEQ ID NO: 184582 - DNA, 11 bp, Unknown
  misc_feature (1)..( 11): Result.005 file - promoters50/3438919
gtttaagcagc

SEQ ID NO: 184583 - DNA, 11 bp, Unknown
  misc_feature (1)..( 11): Result.005 file - promoters50/3438919
ggttaaacatc

SEQ ID NO: 184584 - DNA, 11 bp, Unknown
  misc_feature (1)..( 11): Result.005 file - promoters50/3438919
gtttaaggtaa

SEQ ID NO: 184585 - DNA, 11 bp, Unknown
  misc_feature (1)..( 11): Result.005 file - promoters50/3438919
ttttatttgaa

SEQ ID NO: 184586 - DNA, 11 bp, Unknown
  misc_feature (1)..( 11): Result.005 file - promoters50/3438919
tttgattagaa

SEQ ID NO: 184587 - DNA, 11 bp, Unknown
  misc_feature (1)..( 11): Result.005 file - promoters50/3438919
acacatttgag

SEQ ID NO: 184588 - DNA, 11 bp, Unknown
  misc_feature (1)..( 11): Result.005 file - promoters50/3438919
cttaatttatc

SEQ ID NO: 184589 - DNA, 11 bp, Unknown
  misc_feature (1)..( 11): Result.005 file - promoters50/3438919
caatatttatg

SEQ ID NO: 184590 - DNA, 11 bp, Unknown
  misc_feature (1)..( 11): Result.005 file - promoters50/3438919
gttgattatta

SEQ ID NO: 184591 - DNA, 9 bp, Unknown
  misc_feature (1)..( 9): Result.005 file - promoters50/3438927
atatgtaaa

SEQ ID NO: 184592 - DNA, 9 bp, Unknown
  misc_feature (1)..( 9): Result.005 file - promoters50/3438927
ataagtaaa

SEQ ID NO: 184593 - DNA, 9 bp, Unknown
  misc_feature (1)..( 9): Result.005 file - promoters50/3438927
aagagtaaa

SEQ ID NO: 184594 - DNA, 10 bp, Unknown
  misc_feature (1)..( 10): Result.005 file - promoters50/3438927
ccaaaaaata

SEQ ID NO: 184595 - DNA, 10 bp, Unknown
  misc_feature (1)..( 10): Result.005 file - promoters50/3438927
aaagaaaata

SEQ ID NO: 184596 - DNA, 10 bp, Unknown
  misc_feature (1)..( 10): Result.005 file - promoters50/3438927
aaatgaaata

SEQ ID NO: 184597 - DNA, 9 bp, Unknown
  misc_feature (1)..( 9): Result.005 file - promoters50/3438927
aaaaaaaaa

SEQ ID NO: 184598 - DNA, 9 bp, Unknown
  misc_feature (1)..( 9): Result.005 file - promoters50/3438927
aaaaagaaa

SEQ ID NO: 184599 - DNA, 9 bp, Unknown
  misc_feature (1)..( 9): Result.005 file - promoters50/3438927
aaaaaactt

SEQ ID NO: 184600 - DNA, 8 bp, Unknown
  misc_feature (1)..( 8): Result.005 file - promoters50/3438927
tgtacaaa

SEQ ID NO: 184601 - DNA, 8 bp, Unknown
  misc_feature (1)..( 8): Result.005 file - promoters50/3438927
agtaaaaa

SEQ ID NO: 184602 - DNA, 8 bp, Unknown
  misc_feature (1)..( 8): Result.005 file - promoters50/3438927
agtaaaga

SEQ ID NO: 184603 - DNA, 13 bp, Unknown
  misc_feature (1)..( 13): Result.005 file - promoters50/3438927
gaaaaatcttaac

SEQ ID NO: 184604 - DNA, 13 bp, Unknown
  misc_feature (1)..( 13): Result.005 file - promoters50/3438927
gaaatatcttaac

SEQ ID NO: 184605 - DNA, 13 bp, Unknown
  misc_feature (1)..( 13): Result.005 file - promoters50/3438927
aaaataaaataaa

SEQ ID NO: 184606 - DNA, 8 bp, Unknown
  misc_feature (1)..( 8): Result.005 file - promoters50/3438944
tcaataag

SEQ ID NO: 184607 - DNA, 8 bp, Unknown
  misc_feature (1)..( 8): Result.005 file - promoters50/3438944
acaaaaag

SEQ ID NO: 184608 - DNA, 8 bp, Unknown
  misc_feature (1)..( 8): Result.005 file - promoters50/3438944
acaaaagt

SEQ ID NO: 184609 - DNA, 8 bp, Unknown
  misc_feature (1)..( 8): Result.005 file - promoters50/3438946
ttaaaatc

SEQ ID NO: 184610 - DNA, 8 bp, Unknown
  misc_feature (1)..( 8): Result.005 file - promoters50/3438946
tcaaaatc

SEQ ID NO: 184611 - DNA, 8 bp, Unknown
  misc_feature (1)..( 8): Result.005 file - promoters50/3438946
ttataatg

SEQ ID NO: 184612 - DNA, 8 bp, Unknown
  misc_feature (1)..( 8): Result.005 file - promoters50/3438946
gcataatg

SEQ ID NO: 184613 - DNA, 7 bp, Unknown
  misc_feature (1)..( 7): Result.005 file - promoters50/3438946
agatagt

SEQ ID NO: 184614 - DNA, 7 bp, Unknown
  misc_feature (1)..( 7): Result.005 file - promoters50/3438946
agaaagt

SEQ ID NO: 184615 - DNA, 7 bp, Unknown
  misc_feature (1)..( 7): Result.005 file - promoters50/3438946
agaaagg

SEQ ID NO: 184616 - DNA, 8 bp, Unknown
  misc_feature (1)..( 8): Result.005 file - promoters50/3438946
gttaattg

SEQ ID NO: 184617 - DNA, 8 bp, Unknown
  misc_feature (1)..( 8): Result.005 file - promoters50/3438946
attacttg

SEQ ID NO: 184618 - DNA, 8 bp, Unknown
  misc_feature (1)..( 8): Result.005 file - promoters50/3438946
gttaattg

SEQ ID NO: 184619 - DNA, 10 bp, Unknown
  misc_feature (1)..( 10): Result.005 file - promoters50/3438990
aataaataaa

SEQ ID NO: 184620 - DNA, 10 bp, Unknown
  misc_feature (1)..( 10): Result.005 file - promoters50/3438990
aataaagatc

SEQ ID NO: 184621 - DNA, 10 bp, Unknown
  misc_feature (1)..( 10): Result.005 file - promoters50/3438990
tataaatata

SEQ ID NO: 184622 - DNA, 10 bp, Unknown
  misc_feature (1)..( 10): Result.005 file - promoters50/3438990
cgtaattata

SEQ ID NO: 184623 - DNA, 10 bp, Unknown
  misc_feature (1)..( 10): Result.005 file - promoters50/3438990
tataaacaaa

SEQ ID NO: 184624 - DNA, 10 bp, Unknown
  misc_feature (1)..( 10): Result.005 file - promoters50/3438990
tataaaaaca

SEQ ID NO: 184625 - DNA, 7 bp, Unknown
  misc_feature (1)..( 7): Result.005 file - promoters50/3439000
aataatt

SEQ ID NO: 184626 - DNA, 7 bp, Unknown
  misc_feature (1)..( 7): Result.005 file - promoters50/3439000
aataata

SEQ ID NO: 184627 - DNA, 7 bp, Unknown
  misc_feature (1)..( 7): Result.005 file - promoters50/3439000
aatcatt

SEQ ID NO: 184628 - DNA, 7 bp, Unknown
  misc_feature (1)..( 7): Result.005 file - promoters50/3439012
tctctat

SEQ ID NO: 184629 - DNA, 7 bp, Unknown
  misc_feature (1)..( 7): Result.005 file - promoters50/3439012
tctttat

SEQ ID NO: 184630 - DNA, 7 bp, Unknown
  misc_feature (1)..( 7): Result.005 file - promoters50/3439012
tctcttt

SEQ ID NO: 184631 - DNA, 7 bp, Unknown
  misc_feature (1)..( 7): Result.005 file - promoters50/3439012
cctttat

SEQ ID NO: 184632 - DNA, 12 bp, Unknown
  misc_feature (1)..( 12): Result.005 file - promoters50/3439012
attaattacgca

SEQ ID NO: 184633 - DNA, 12 bp, Unknown
  misc_feature (1)..( 12): Result.005 file - promoters50/3439012
cttagttacaga

SEQ ID NO: 184634 - DNA, 12 bp, Unknown
  misc_feature (1)..( 12): Result.005 file - promoters50/3439012
attaatgttaac

SEQ ID NO: 184635 - DNA, 12 bp, Unknown
  misc_feature (1)..( 12): Result.005 file - promoters50/3439012
ggcggttccaga

SEQ ID NO: 184636 - DNA, 11 bp, Unknown
  misc_feature (1)..( 11): Result.005 file - promoters50/3439014
tttttgctcca

SEQ ID NO: 184637 - DNA, 11 bp, Unknown
  misc_feature (1)..( 11): Result.005 file - promoters50/3439014
aatttggtcca

SEQ ID NO: 184638 - DNA, 11 bp, Unknown
  misc_feature (1)..( 11): Result.005 file - promoters50/3439014
tttttgttccc

SEQ ID NO: 184639 - DNA, 8 bp, Unknown
  misc_feature (1)..( 8): Result.005 file - promoters50/3439026
aaagaata

SEQ ID NO: 184640 - DNA, 8 bp, Unknown
  misc_feature (1)..( 8): Result.005 file - promoters50/3439026
aaaaaatt

SEQ ID NO: 184641 - DNA, 8 bp, Unknown
  misc_feature (1)..( 8): Result.005 file - promoters50/3439026
gcagaata

SEQ ID NO: 184642 - DNA, 11 bp, Unknown
  misc_feature (1)..( 11): Result.005 file - promoters50/3439026
aaagagttttg

SEQ ID NO: 184643 - DNA, 11 bp, Unknown
  misc_feature (1)..( 11): Result.005 file - promoters50/3439026
tattagttttg

SEQ ID NO: 184644 - DNA, 11 bp, Unknown
  misc_feature (1)..( 11): Result.005 file - promoters50/3439026
atggagatttg

SEQ ID NO: 184645 - DNA, 11 bp, Unknown
  misc_feature (1)..( 11): Result.005 file - promoters50/3439026
aaagagcttta

SEQ ID NO: 184646 - DNA, 7 bp, Unknown
  misc_feature (1)..( 7): Result.005 file - promoters50/3439026
cgagatc

SEQ ID NO: 184647 - DNA, 7 bp, Unknown
  misc_feature (1)..( 7): Result.005 file - promoters50/3439026
cgagatt

SEQ ID NO: 184648 - DNA, 7 bp, Unknown
  misc_feature (1)..( 7): Result.005 file - promoters50/3439026
cgaaatc

SEQ ID NO: 184649 - DNA, 8 bp, Unknown
  misc_feature (1)..( 8): Result.005 file - promoters50/3439026
aaataaat

SEQ ID NO: 184650 - DNA, 8 bp, Unknown
  misc_feature (1)..( 8): Result.005 file - promoters50/3439026
aaataatt

SEQ ID NO: 184651 - DNA, 8 bp, Unknown
  misc_feature (1)..( 8): Result.005 file - promoters50/3439026
aaataatt

SEQ ID NO: 184652 - DNA, 7 bp, Unknown
  misc_feature (1)..( 7): Result.005 file - promoters50/3439026
attatat

SEQ ID NO: 184653 - DNA, 7 bp, Unknown
  misc_feature (1)..( 7): Result.005 file - promoters50/3439026
tttatat

SEQ ID NO: 184654 - DNA, 8 bp, Unknown
  misc_feature (1)..( 8): Result.005 file - promoters50/3439026
tttgataa

SEQ ID NO: 184655 - DNA, 9 bp, Unknown
  misc_feature (1)..( 9): Result.005 file - promoters50/3439044
aaaaatgtg

SEQ ID NO: 184656 - DNA, 9 bp, Unknown
  misc_feature (1)..( 9): Result.005 file - promoters50/3439044
ttaaaggtg

SEQ ID NO: 184657 - DNA, 9 bp, Unknown
  misc_feature (1)..( 9): Result.005 file - promoters50/3439044
caaaatgtt

SEQ ID NO: 184658 - DNA, 9 bp, Unknown
  misc_feature (1)..( 9): Result.005 file - promoters50/3439044
aaaaagatg

SEQ ID NO: 184659 - DNA, 9 bp, Unknown
  misc_feature (1)..( 9): Result.005 file - promoters50/3439044
agaaatgat

SEQ ID NO: 184660 - DNA, 9 bp, Unknown
  misc_feature (1)..( 9): Result.005 file - promoters50/3439044
ttaaaggat

SEQ ID NO: 184661 - DNA, 9 bp, Unknown
  misc_feature (1)..( 9): Result.005 file - promoters50/3439044
tgtttctgt

SEQ ID NO: 184662 - DNA, 9 bp, Unknown
  misc_feature (1)..( 9): Result.005 file - promoters50/3439044
agtttgtgt

SEQ ID NO: 184663 - DNA, 9 bp, Unknown
  misc_feature (1)..( 9): Result.005 file - promoters50/3439044
agtttgttg

SEQ ID NO: 184664 - DNA, 9 bp, Unknown
  misc_feature (1)..( 9): Result.005 file - promoters50/3439044
gatttcttg

SEQ ID NO: 184665 - DNA, 9 bp, Unknown
  misc_feature (1)..( 9): Result.005 file - promoters50/3439044
gattttttg

SEQ ID NO: 184666 - DNA, 9 bp, Unknown
  misc_feature (1)..( 9): Result.005 file - promoters50/3439044
tctttcttc

SEQ ID NO: 184667 - DNA, 14 bp, Unknown
  misc_feature (1)..( 14): Result.005 file - promoters50/3439056
aactgaaataattt

SEQ ID NO: 184668 - DNA, 14 bp, Unknown
  misc_feature (1)..( 14): Result.005 file - promoters50/3439056
gcttgtgataattt

SEQ ID NO: 184669 - DNA, 14 bp, Unknown
  misc_feature (1)..( 14): Result.005 file - promoters50/3439056
atcttaaacaatac

SEQ ID NO: 184670 - DNA, 14 bp, Unknown
  misc_feature (1)..( 14): Result.005 file - promoters50/3439056
aactgaactaatca

SEQ ID NO: 184671 - DNA, 14 bp, Unknown
  misc_feature (1)..( 14): Result.005 file - promoters50/3439056
aactcaaatctgta

SEQ ID NO: 184672 - DNA, 9 bp, Unknown
  misc_feature (1)..( 9): Result.005 file - promoters50/3439059
ttatatata

SEQ ID NO: 184673 - DNA, 9 bp, Unknown
  misc_feature (1)..( 9): Result.005 file - promoters50/3439059
gtataaata

SEQ ID NO: 184674 - DNA, 9 bp, Unknown
  misc_feature (1)..( 9): Result.005 file - promoters50/3439059
ataaaaatg

SEQ ID NO: 184675 - DNA, 9 bp, Unknown
  misc_feature (1)..( 9): Result.005 file - promoters50/3439059
tcataaatg

SEQ ID NO: 184676 - DNA, 10 bp, Unknown
  misc_feature (1)..( 10): Result.005 file - promoters50/3439059
tataataatt

SEQ ID NO: 184677 - DNA, 10 bp, Unknown
  misc_feature (1)..( 10): Result.005 file - promoters50/3439059
aataaaaatg

SEQ ID NO: 184678 - DNA, 10 bp, Unknown
  misc_feature (1)..( 10): Result.005 file - promoters50/3439059
tatcataaat

SEQ ID NO: 184679 - DNA, 10 bp, Unknown
  misc_feature (1)..( 10): Result.005 file - promoters50/3439059
tataaatatg

SEQ ID NO: 184680 - DNA, 12 bp, Unknown
  misc_feature (1)..( 12): Result.005 file - promoters50/3439063
aacatgtcttag

SEQ ID NO: 184681 - DNA, 12 bp, Unknown
  misc_feature (1)..( 12): Result.005 file - promoters50/3439063
aacttgttttag

SEQ ID NO: 184682 - DNA, 12 bp, Unknown
  misc_feature (1)..( 12): Result.005 file - promoters50/3439063
ttttggtcttat

SEQ ID NO: 184683 - DNA, 12 bp, Unknown
  misc_feature (1)..( 12): Result.005 file - promoters50/3439063
atcatgtcacaa

SEQ ID NO: 184684 - DNA, 12 bp, Unknown
  misc_feature (1)..( 12): Result.005 file - promoters50/3439063
aatatgtcaaaa

SEQ ID NO: 184685 - DNA, 11 bp, Unknown
  misc_feature (1)..( 11): Result.005 file - promoters50/3439063
gactaacatta

SEQ ID NO: 184686 - DNA, 11 bp, Unknown
  misc_feature (1)..( 11): Result.005 file - promoters50/3439063
actcaacatta

SEQ ID NO: 184687 - DNA, 11 bp, Unknown
  misc_feature (1)..( 11): Result.005 file - promoters50/3439063
attcaaaattt

SEQ ID NO: 184688 - DNA, 11 bp, Unknown
  misc_feature (1)..( 11): Result.005 file - promoters50/3439063
attgaaaattc

SEQ ID NO: 184689 - DNA, 11 bp, Unknown
  misc_feature (1)..( 11): Result.005 file - promoters50/3439063
tagaaaaattg

SEQ ID NO: 184690 - DNA, 8 bp, Unknown
  misc_feature (1)..( 8): Result.005 file - promoters50/3439129
tttaagaa

SEQ ID NO: 184691 - DNA, 8 bp, Unknown
  misc_feature (1)..( 8): Result.005 file - promoters50/3439129
gttaggaa

SEQ ID NO: 184692 - DNA, 8 bp, Unknown
  misc_feature (1)..( 8): Result.005 file - promoters50/3439129
tttaagtt

SEQ ID NO: 184693 - DNA, 7 bp, Unknown
  misc_feature (1)..( 7): Result.005 file - promoters50/3439129
taattta

SEQ ID NO: 184694 - DNA, 7 bp, Unknown
  misc_feature (1)..( 7): Result.005 file - promoters50/3439129
caattta

SEQ ID NO: 184695 - DNA, 7 bp, Unknown
  misc_feature (1)..( 7): Result.005 file - promoters50/3439129
taagtta

SEQ ID NO: 184696 - DNA, 11 bp, Unknown
  misc_feature (1)..( 11): Result.005 file - promoters50/3439129
agaggaaatga

SEQ ID NO: 184697 - DNA, 11 bp, Unknown
  misc_feature (1)..( 11): Result.005 file - promoters50/3439129
agagtaaataa

SEQ ID NO: 184698 - DNA, 11 bp, Unknown
  misc_feature (1)..( 11): Result.005 file - promoters50/3439129
tcttgaagtga

SEQ ID NO: 184699 - DNA, 9 bp, Unknown
  misc_feature (1)..( 9): Result.005 file - promoters50/3439129
tctatttaa

SEQ ID NO: 184700 - DNA, 9 bp, Unknown
  misc_feature (1)..( 9): Result.005 file - promoters50/3439129
tcttttttt

SEQ ID NO: 184701 - DNA, 9 bp, Unknown
  misc_feature (1)..( 9): Result.005 file - promoters50/3439129
tctaattaa

SEQ ID NO: 184702 - DNA, 7 bp, Unknown
  misc_feature (1)..( 7): Result.005 file - promoters50/3439129
aaacagt

SEQ ID NO: 184703 - DNA, 7 bp, Unknown
  misc_feature (1)..( 7): Result.005 file - promoters50/3439129
aaacaga

SEQ ID NO: 184704 - DNA, 7 bp, Unknown
  misc_feature (1)..( 7): Result.005 file - promoters50/3439129
aaagaga

SEQ ID NO: 184705 - DNA, 10 bp, Unknown
  misc_feature (1)..( 10): Result.005 file - promoters50/3439129
taacagaaaa

SEQ ID NO: 184706 - DNA, 10 bp, Unknown
  misc_feature (1)..( 10): Result.005 file - promoters50/3439129
taacagagat

SEQ ID NO: 184707 - DNA, 10 bp, Unknown
  misc_feature (1)..( 10): Result.005 file - promoters50/3439129
atacagagat

SEQ ID NO: 184708 - DNA, 7 bp, Unknown
  misc_feature (1)..( 7): Result.005 file - promoters50/3439145
ctaatta

SEQ ID NO: 184709 - DNA, 7 bp, Unknown
  misc_feature (1)..( 7): Result.005 file - promoters50/3439145
ataatta

SEQ ID NO: 184710 - DNA, 7 bp, Unknown
  misc_feature (1)..( 7): Result.005 file - promoters50/3439145
atagtta

SEQ ID NO: 184711 - DNA, 7 bp, Unknown
  misc_feature (1)..( 7): Result.005 file - promoters50/3439145
ttacaaa

SEQ ID NO: 184712 - DNA, 7 bp, Unknown
  misc_feature (1)..( 7): Result.005 file - promoters50/3439145
ttaaaaa

SEQ ID NO: 184713 - DNA, 7 bp, Unknown
  misc_feature (1)..( 7): Result.005 file - promoters50/3439145
ttaaaag

SEQ ID NO: 184714 - DNA, 8 bp, Unknown
  misc_feature (1)..( 8): Result.005 file - promoters50/3439175
catgattt

SEQ ID NO: 184715 - DNA, 8 bp, Unknown
  misc_feature (1)..( 8): Result.005 file - promoters50/3439175
gatgcttt

SEQ ID NO: 184716 - DNA, 8 bp, Unknown
  misc_feature (1)..( 8): Result.005 file - promoters50/3439175
cataatta

SEQ ID NO: 184717 - DNA, 13 bp, Unknown
  misc_feature (1)..( 13): Result.005 file - promoters50/3439206
tagaatatttttt

SEQ ID NO: 184718 - DNA, 13 bp, Unknown
  misc_feature (1)..( 13): Result.005 file - promoters50/3439206
aagaaaattcttt

SEQ ID NO: 184719 - DNA, 13 bp, Unknown
  misc_feature (1)..( 13): Result.005 file - promoters50/3439206
aagaaagttcatc

SEQ ID NO: 184720 - DNA, 13 bp, Unknown
  misc_feature (1)..( 13): Result.005 file - promoters50/3439206
ccacgatttcttt

SEQ ID NO: 184721 - DNA, 13 bp, Unknown
  misc_feature (1)..( 13): Result.005 file - promoters50/3439206
ggtaaagttgatt

SEQ ID NO: 184722 - DNA, 13 bp, Unknown
  misc_feature (1)..( 13): Result.005 file - promoters50/3439206
cacaaacttggaa

SEQ ID NO: 184723 - DNA, 8 bp, Unknown
  misc_feature (1)..( 8): Result.005 file - promoters50/3439206
aaaaaact

SEQ ID NO: 184724 - DNA, 8 bp, Unknown
  misc_feature (1)..( 8): Result.005 file - promoters50/3439206
caaaaaca

SEQ ID NO: 184725 - DNA, 9 bp, Unknown
  misc_feature (1)..( 9): Result.005 file - promoters50/3439206
taataaata

SEQ ID NO: 184726 - DNA, 9 bp, Unknown
  misc_feature (1)..( 9): Result.005 file - promoters50/3439206
aaaagaaca

SEQ ID NO: 184727 - DNA, 9 bp, Unknown
  misc_feature (1)..( 9): Result.005 file - promoters50/3439206
caaaaagaa

SEQ ID NO: 184728 - DNA, 9 bp, Unknown
  misc_feature (1)..( 9): Result.005 file - promoters50/3439206
ggcaaaaca

SEQ ID NO: 184729 - DNA, 13 bp, Unknown
  misc_feature (1)..( 13): Result.005 file - promoters50/3439224
cttatctgggcct

SEQ ID NO: 184730 - DNA, 13 bp, Unknown
  misc_feature (1)..( 13): Result.005 file - promoters50/3439224
attatatgggcct

SEQ ID NO: 184731 - DNA, 13 bp, Unknown
  misc_feature (1)..( 13): Result.005 file - promoters50/3439224
attataaatagcc

SEQ ID NO: 184732 - DNA, 8 bp, Unknown
  misc_feature (1)..( 8): Result.005 file - promoters50/3439224
tttgttgt

SEQ ID NO: 184733 - DNA, 8 bp, Unknown
  misc_feature (1)..( 8): Result.005 file - promoters50/3439224
tttgtttc

SEQ ID NO: 184734 - DNA, 8 bp, Unknown
  misc_feature (1)..( 8): Result.005 file - promoters50/3439224
tttcttgt

SEQ ID NO: 184735 - DNA, 11 bp, Unknown
  misc_feature (1)..( 11): Result.005 file - promoters50/3439289
caatattttta

SEQ ID NO: 184736 - DNA, 11 bp, Unknown
  misc_feature (1)..( 11): Result.005 file - promoters50/3439289
aattattttca

SEQ ID NO: 184737 - DNA, 11 bp, Unknown
  misc_feature (1)..( 11): Result.005 file - promoters50/3439289
actgatttttc

SEQ ID NO: 184738 - DNA, 11 bp, Unknown
  misc_feature (1)..( 11): Result.005 file - promoters50/3439289
ttttatttcat

SEQ ID NO: 184739 - DNA, 11 bp, Unknown
  misc_feature (1)..( 11): Result.005 file - promoters50/3439289
tgttatcttca

SEQ ID NO: 184740 - DNA, 11 bp, Unknown
  misc_feature (1)..( 11): Result.005 file - promoters50/3439289
tgtaatcatac

SEQ ID NO: 184741 - DNA, 11 bp, Unknown
  misc_feature (1)..( 11): Result.005 file - promoters50/3439289
aatatttttac

SEQ ID NO: 184742 - DNA, 11 bp, Unknown
  misc_feature (1)..( 11): Result.005 file - promoters50/3439289
aaagtttttat

SEQ ID NO: 184743 - DNA, 11 bp, Unknown
  misc_feature (1)..( 11): Result.005 file - promoters50/3439289
tactgttttac

SEQ ID NO: 184744 - DNA, 11 bp, Unknown
  misc_feature (1)..( 11): Result.005 file - promoters50/3439289
cagctttttat

SEQ ID NO: 184745 - DNA, 11 bp, Unknown
  misc_feature (1)..( 11): Result.005 file - promoters50/3439289
ctgatttttca

SEQ ID NO: 184746 - DNA, 11 bp, Unknown
  misc_feature (1)..( 11): Result.005 file - promoters50/3439289
tgaatttggag

SEQ ID NO: 184747 - DNA, 18 bp, Unknown
  misc_feature (1)..( 18): Result.005 file - promoters50/3439289
gtatataagatatatgga

SEQ ID NO: 184748 - DNA, 18 bp, Unknown
  misc_feature (1)..( 18): Result.005 file - promoters50/3439289
ccaaaaaagaaatatgtc

SEQ ID NO: 184749 - DNA, 18 bp, Unknown
  misc_feature (1)..( 18): Result.005 file - promoters50/3439289
aataaatataaatatgga

SEQ ID NO: 184750 - DNA, 18 bp, Unknown
  misc_feature (1)..( 18): Result.005 file - promoters50/3439289
ttatgtgacatatatctt

SEQ ID NO: 184751 - DNA, 18 bp, Unknown
  misc_feature (1)..( 18): Result.005 file - promoters50/3439289
ccataaaggaaaaagccc

SEQ ID NO: 184752 - DNA, 18 bp, Unknown
  misc_feature (1)..( 18): Result.005 file - promoters50/3439289
tgtttatggaaaattggt

SEQ ID NO: 184753 - DNA, 14 bp, Unknown
  misc_feature (1)..( 14): Result.005 file - promoters50/3439289
aaaaaggaaagaat

SEQ ID NO: 184754 - DNA, 14 bp, Unknown
  misc_feature (1)..( 14): Result.005 file - promoters50/3439289
cgacaggaaaatgg

SEQ ID NO: 184755 - DNA, 14 bp, Unknown
  misc_feature (1)..( 14): Result.005 file - promoters50/3439289
ataaagcaaacaat

SEQ ID NO: 184756 - DNA, 14 bp, Unknown
  misc_feature (1)..( 14): Result.005 file - promoters50/3439289
aaaaaagaaataaa

SEQ ID NO: 184757 - DNA, 14 bp, Unknown
  misc_feature (1)..( 14): Result.005 file - promoters50/3439289
cttcaacaatatgc

SEQ ID NO: 184758 - DNA, 14 bp, Unknown
  misc_feature (1)..( 14): Result.005 file - promoters50/3439289
tcacaacaaattta

SEQ ID NO: 184759 - DNA, 14 bp, Unknown
  misc_feature (1)..( 14): Result.005 file - promoters50/3439289
aaaaaacaaataaa

SEQ ID NO: 184760 - DNA, 10 bp, Unknown
  misc_feature (1)..( 10): Result.005 file - promoters50/3439289
ccttgtactc

SEQ ID NO: 184761 - DNA, 10 bp, Unknown
  misc_feature (1)..( 10): Result.005 file - promoters50/3439289
ctttgtactt

SEQ ID NO: 184762 - DNA, 10 bp, Unknown
  misc_feature (1)..( 10): Result.005 file - promoters50/3439289
acttgtacac

SEQ ID NO: 184763 - DNA, 10 bp, Unknown
  misc_feature (1)..( 10): Result.005 file - promoters50/3439289
aattgtactt

SEQ ID NO: 184764 - DNA, 10 bp, Unknown
  misc_feature (1)..( 10): Result.005 file - promoters50/3439289
aatagtaaaa

SEQ ID NO: 184765 - DNA, 10 bp, Unknown
  misc_feature (1)..( 10): Result.005 file - promoters50/3439289
tgttgtgctt

SEQ ID NO: 184766 - DNA, 13 bp, Unknown
  misc_feature (1)..( 13): Result.005 file - promoters50/3439289
acgttaaggcaaa

SEQ ID NO: 184767 - DNA, 13 bp, Unknown
  misc_feature (1)..( 13): Result.005 file - promoters50/3439289
ccataaaggaaaa

SEQ ID NO: 184768 - DNA, 13 bp, Unknown
  misc_feature (1)..( 13): Result.005 file - promoters50/3439289
ccaaaaaagaaat

SEQ ID NO: 184769 - DNA, 13 bp, Unknown
  misc_feature (1)..( 13): Result.005 file - promoters50/3439289
tgtttaaaacaaa

SEQ ID NO: 184770 - DNA, 13 bp, Unknown
  misc_feature (1)..( 13): Result.005 file - promoters50/3439289
ataaaaaagaaaa

SEQ ID NO: 184771 - DNA, 13 bp, Unknown
  misc_feature (1)..( 13): Result.005 file - promoters50/3439289
tgtttatggaaaa

SEQ ID NO: 184772 - DNA, 13 bp, Unknown
  misc_feature (1)..( 13): Result.005 file - promoters50/3439289
ttaataaaacatt

SEQ ID NO: 184773 - DNA, 10 bp, Unknown
  misc_feature (1)..( 10): Result.005 file - promoters50/3439303
gcttggattc

SEQ ID NO: 184774 - DNA, 10 bp, Unknown
  misc_feature (1)..( 10): Result.005 file - promoters50/3439303
gtatggatta

SEQ ID NO: 184775 - DNA, 10 bp, Unknown
  misc_feature (1)..( 10): Result.005 file - promoters50/3439303
ttttgaattc

SEQ ID NO: 184776 - DNA, 10 bp, Unknown
  misc_feature (1)..( 10): Result.005 file - promoters50/3439303
tattgatgtg

SEQ ID NO: 184777 - DNA, 7 bp, Unknown
  misc_feature (1)..( 7): Result.005 file - promoters50/3439307
gaagatc

SEQ ID NO: 184778 - DNA, 6 bp, Unknown
  misc_feature (1)..( 6): Result.005 file - promoters50/3439307
aagatc

SEQ ID NO: 184779 - DNA, 7 bp, Unknown
  misc_feature (1)..( 7): Result.005 file - promoters50/3439307
gaagatg

SEQ ID NO: 184780 - DNA, 8 bp, Unknown
  misc_feature (1)..( 8): Result.005 file - promoters50/3439307
tgataatg

SEQ ID NO: 184781 - DNA, 8 bp, Unknown
  misc_feature (1)..( 8): Result.005 file - promoters50/3439307
tgataaga

SEQ ID NO: 184782 - DNA, 8 bp, Unknown
  misc_feature (1)..( 8): Result.005 file - promoters50/3439307
cgattaga

SEQ ID NO: 184783 - DNA, 7 bp, Unknown
  misc_feature (1)..( 7): Result.005 file - promoters50/3439330
attataa

SEQ ID NO: 184784 - DNA, 7 bp, Unknown
  misc_feature (1)..( 7): Result.005 file - promoters50/3439330
attttaa

SEQ ID NO: 184785 - DNA, 7 bp, Unknown
  misc_feature (1)..( 7): Result.005 file - promoters50/3439330
attttaa

SEQ ID NO: 184786 - DNA, 10 bp, Unknown
  misc_feature (1)..( 10): Result.005 file - promoters50/3439330
aataaaaaaa

SEQ ID NO: 184787 - DNA, 10 bp, Unknown
  misc_feature (1)..( 10): Result.005 file - promoters50/3439330
aataataaaa

SEQ ID NO: 184788 - DNA, 10 bp, Unknown
  misc_feature (1)..( 10): Result.005 file - promoters50/3439330
cggaaaaaag

SEQ ID NO: 184789 - DNA, 8 bp, Unknown
  misc_feature (1)..( 8): Result.005 file - promoters50/3439330
caaagagt

SEQ ID NO: 184790 - DNA, 8 bp, Unknown
  misc_feature (1)..( 8): Result.005 file - promoters50/3439330
aaaagagg

SEQ ID NO: 184791 - DNA, 8 bp, Unknown
  misc_feature (1)..( 8): Result.005 file - promoters50/3439330
aaaataga

SEQ ID NO: 184792 - DNA, 9 bp, Unknown
  misc_feature (1)..( 9): Result.005 file - promoters50/3439334
ttttacttg

SEQ ID NO: 184793 - DNA, 9 bp, Unknown
  misc_feature (1)..( 9): Result.005 file - promoters50/3439334
tgttatttg

SEQ ID NO: 184794 - DNA, 9 bp, Unknown
  misc_feature (1)..( 9): Result.005 file - promoters50/3439334
ttttatttg

SEQ ID NO: 184795 - DNA, 7 bp, Unknown
  misc_feature (1)..( 7): Result.005 file - promoters50/3439334
ttatatg

SEQ ID NO: 184796 - DNA, 7 bp, Unknown
  misc_feature (1)..( 7): Result.005 file - promoters50/3439334
atatatg

SEQ ID NO: 184797 - DNA, 7 bp, Unknown
  misc_feature (1)..( 7): Result.005 file - promoters50/3439334
ttatata

SEQ ID NO: 184798 - DNA, 7 bp, Unknown
  misc_feature (1)..( 7): Result.005 file - promoters50/3439334
aaaataa

SEQ ID NO: 184799 - DNA, 7 bp, Unknown
  misc_feature (1)..( 7): Result.005 file - promoters50/3439334
aaattaa

SEQ ID NO: 184800 - DNA, 7 bp, Unknown
  misc_feature (1)..( 7): Result.005 file - promoters50/3439334
aaaataa

SEQ ID NO: 184801 - DNA, 8 bp, Unknown
  misc_feature (1)..( 8): Result.005 file - promoters50/3439334
aaaaatag

SEQ ID NO: 184802 - DNA, 8 bp, Unknown
  misc_feature (1)..( 8): Result.005 file - promoters50/3439334
aaaaataa

SEQ ID NO: 184803 - DNA, 8 bp, Unknown
  misc_feature (1)..( 8): Result.005 file - promoters50/3439334
gaaattaa

SEQ ID NO: 184804 - DNA, 7 bp, Unknown
  misc_feature (1)..( 7): Result.005 file - promoters50/3439334
ttaaaat

SEQ ID NO: 184805 - DNA, 7 bp, Unknown
  misc_feature (1)..( 7): Result.005 file - promoters50/3439334
ttaaaat

SEQ ID NO: 184806 - DNA, 7 bp, Unknown
  misc_feature (1)..( 7): Result.005 file - promoters50/3439334
ttaaaaa

SEQ ID NO: 184807 - DNA, 7 bp, Unknown
  misc_feature (1)..( 7): Result.005 file - promoters50/3439334
taacttt

SEQ ID NO: 184808 - DNA, 7 bp, Unknown
  misc_feature (1)..( 7): Result.005 file - promoters50/3439334
aaacttt

SEQ ID NO: 184809 - DNA, 8 bp, Unknown
  misc_feature (1)..( 8): Result.005 file - promoters50/3439334
aaatcttg

SEQ ID NO: 184810 - DNA, 16 bp, Unknown
  misc_feature (1)..( 16): Result.005 file - promoters50/3439353
atatgcttatattcgt

SEQ ID NO: 184811 - DNA, 16 bp, Unknown
  misc_feature (1)..( 16): Result.005 file - promoters50/3439353
aaatctttaaattatt

SEQ ID NO: 184812 - DNA, 16 bp, Unknown
  misc_feature (1)..( 16): Result.005 file - promoters50/3439353
aaagctttaaacttta

SEQ ID NO: 184813 - DNA, 16 bp, Unknown
  misc_feature (1)..( 16): Result.005 file - promoters50/3439353
gagagaagaaatgatt

SEQ ID NO: 184814 - DNA, 16 bp, Unknown
  misc_feature (1)..( 16): Result.005 file - promoters50/3439353
ctagctttcaccatca

SEQ ID NO: 184815 - DNA, 16 bp, Unknown
  misc_feature (1)..( 16): Result.005 file - promoters50/3439353
tttcactgaaatgcta

SEQ ID NO: 184816 - DNA, 17 bp, Unknown
  misc_feature (1)..( 17): Result.005 file - promoters50/3439364
aaaaacatgttggtatg

SEQ ID NO: 184817 - DNA, 17 bp, Unknown
  misc_feature (1)..( 17): Result.005 file - promoters50/3439364
tgactcattttgacatc

SEQ ID NO: 184818 - DNA, 17 bp, Unknown
  misc_feature (1)..( 17): Result.005 file - promoters50/3439364
aaaaaaatgtttgataa

SEQ ID NO: 184819 - DNA, 17 bp, Unknown
  misc_feature (1)..( 17): Result.005 file - promoters50/3439364
aaccttgttttgatcgc

SEQ ID NO: 184820 - DNA, 17 bp, Unknown
  misc_feature (1)..( 17): Result.005 file - promoters50/3439364
tatcggctgatgaaaaa

SEQ ID NO: 184821 - DNA, 17 bp, Unknown
  misc_feature (1)..( 17): Result.005 file - promoters50/3439364
acaaaaatggataacgt

SEQ ID NO: 184822 - DNA, 17 bp, Unknown
  misc_feature (1)..( 17): Result.005 file - promoters50/3439364
tataaaatgcacgttga

SEQ ID NO: 184823 - DNA, 19 bp, Unknown
  misc_feature (1)..( 19): Result.005 file - promoters50/3439364
gtgattttaaaaaaaaaaa

SEQ ID NO: 184824 - DNA, 19 bp, Unknown
  misc_feature (1)..( 19): Result.005 file - promoters50/3439364
ttttttttaacaaatttct

SEQ ID NO: 184825 - DNA, 19 bp, Unknown
  misc_feature (1)..( 19): Result.005 file - promoters50/3439364
atatttttataaatagtaa

SEQ ID NO: 184826 - DNA, 19 bp, Unknown
  misc_feature (1)..( 19): Result.005 file - promoters50/3439364
tagaagttaaaaaatcttg

SEQ ID NO: 184827 - DNA, 19 bp, Unknown
  misc_feature (1)..( 19): Result.005 file - promoters50/3439364
accaaattaaaatgtttgt

SEQ ID NO: 184828 - DNA, 19 bp, Unknown
  misc_feature (1)..( 19): Result.005 file - promoters50/3439364
atatatttaatcagaaatt

SEQ ID NO: 184829 - DNA, 19 bp, Unknown
  misc_feature (1)..( 19): Result.005 file - promoters50/3439364
atcgctttaaactatagtt

SEQ ID NO: 184830 - DNA, 19 bp, Unknown
  misc_feature (1)..( 19): Result.005 file - promoters50/3439364
ttgagatagtactatcgtt

SEQ ID NO: 184831 - DNA, 13 bp, Unknown
  misc_feature (1)..( 13): Result.005 file - promoters50/3439364
gcatatatataag

SEQ ID NO: 184832 - DNA, 13 bp, Unknown
  misc_feature (1)..( 13): Result.005 file - promoters50/3439364
tactatataaact

SEQ ID NO: 184833 - DNA, 13 bp, Unknown
  misc_feature (1)..( 13): Result.005 file - promoters50/3439364
gtatatatactct

SEQ ID NO: 184834 - DNA, 13 bp, Unknown
  misc_feature (1)..( 13): Result.005 file - promoters50/3439364
ctatatataaagt

SEQ ID NO: 184835 - DNA, 13 bp, Unknown
  misc_feature (1)..( 13): Result.005 file - promoters50/3439364
ctatatataaaga

SEQ ID NO: 184836 - DNA, 13 bp, Unknown
  misc_feature (1)..( 13): Result.005 file - promoters50/3439364
ccttctataaaaa

SEQ ID NO: 184837 - DNA, 11 bp, Unknown
  misc_feature (1)..( 11): Result.005 file - promoters50/3439364
aaaaaaaaaat

SEQ ID NO: 184838 - DNA, 11 bp, Unknown
  misc_feature (1)..( 11): Result.005 file - promoters50/3439364
aaaaaaagaat

SEQ ID NO: 184839 - DNA, 11 bp, Unknown
  misc_feature (1)..( 11): Result.005 file - promoters50/3439364
aaaatactgaa

SEQ ID NO: 184840 - DNA, 11 bp, Unknown
  misc_feature (1)..( 11): Result.005 file - promoters50/3439364
aaaataataat

SEQ ID NO: 184841 - DNA, 11 bp, Unknown
  misc_feature (1)..( 11): Result.005 file - promoters50/3439364
gaatgaagaat

SEQ ID NO: 184842 - DNA, 11 bp, Unknown
  misc_feature (1)..( 11): Result.005 file - promoters50/3439364
tcaaacagatg

SEQ ID NO: 184843 - DNA, 11 bp, Unknown
  misc_feature (1)..( 11): Result.005 file - promoters50/3439364
ttaaaatatat

SEQ ID NO: 184844 - DNA, 11 bp, Unknown
  misc_feature (1)..( 11): Result.005 file - promoters50/3439364
ctgaaatatta

SEQ ID NO: 184845 - DNA, 11 bp, Unknown
  misc_feature (1)..( 11): Result.005 file - promoters50/3439364
cgacaatgtat

SEQ ID NO: 184846 - DNA, 12 bp, Unknown
  misc_feature (1)..( 12): Result.005 file - promoters50/3439364
tttaaactatag

SEQ ID NO: 184847 - DNA, 12 bp, Unknown
  misc_feature (1)..( 12): Result.005 file - promoters50/3439364
attgacatattt

SEQ ID NO: 184848 - DNA, 12 bp, Unknown
  misc_feature (1)..( 12): Result.005 file - promoters50/3439364
attgagatagta

SEQ ID NO: 184849 - DNA, 12 bp, Unknown
  misc_feature (1)..( 12): Result.005 file - promoters50/3439374
tagtaattactg

SEQ ID NO: 184850 - DNA, 12 bp, Unknown
  misc_feature (1)..( 12): Result.005 file - promoters50/3439374
tcttaattaaaa

SEQ ID NO: 184851 - DNA, 12 bp, Unknown
  misc_feature (1)..( 12): Result.005 file - promoters50/3439374
ttagaattacaa

SEQ ID NO: 184852 - DNA, 12 bp, Unknown
  misc_feature (1)..( 12): Result.005 file - promoters50/3439374
tctttatttgat

SEQ ID NO: 184853 - DNA, 12 bp, Unknown
  misc_feature (1)..( 12): Result.005 file - promoters50/3439374
aatcaagtgttt

SEQ ID NO: 184854 - DNA, 12 bp, Unknown
  misc_feature (1)..( 12): Result.005 file - promoters50/3439374
tctttatttcta

SEQ ID NO: 184855 - DNA, 12 bp, Unknown
  misc_feature (1)..( 12): Result.005 file - promoters50/3439374
atttaattctgt

SEQ ID NO: 184856 - DNA, 9 bp, Unknown
  misc_feature (1)..( 9): Result.005 file - promoters50/3439392
aaaaaggtt

SEQ ID NO: 184857 - DNA, 9 bp, Unknown
  misc_feature (1)..( 9): Result.005 file - promoters50/3439392
aaaatggtt

SEQ ID NO: 184858 - DNA, 9 bp, Unknown
  misc_feature (1)..( 9): Result.005 file - promoters50/3439392
taaattgtt

SEQ ID NO: 184859 - DNA, 14 bp, Unknown
  misc_feature (1)..( 14): Result.005 file - promoters50/3439416
ttgattaaaatgtc

SEQ ID NO: 184860 - DNA, 14 bp, Unknown
  misc_feature (1)..( 14): Result.005 file - promoters50/3439416
tactataaaatact

SEQ ID NO: 184861 - DNA, 14 bp, Unknown
  misc_feature (1)..( 14): Result.005 file - promoters50/3439416
tacaataaaaagag

SEQ ID NO: 184862 - DNA, 14 bp, Unknown
  misc_feature (1)..( 14): Result.005 file - promoters50/3439416
gagaatacaatcca

SEQ ID NO: 184863 - DNA, 14 bp, Unknown
  misc_feature (1)..( 14): Result.005 file - promoters50/3439416
aaaaatcaaatctt

SEQ ID NO: 184864 - DNA, 14 bp, Unknown
  misc_feature (1)..( 14): Result.005 file - promoters50/3439416
gaacatcaaatagt

SEQ ID NO: 184865 - DNA, 14 bp, Unknown
  misc_feature (1)..( 14): Result.005 file - promoters50/3439416
cttaatcaaatagt

SEQ ID NO: 184866 - DNA, 12 bp, Unknown
  misc_feature (1)..( 12): Result.005 file - promoters50/3439420
cttttttagtat

SEQ ID NO: 184867 - DNA, 12 bp, Unknown
  misc_feature (1)..( 12): Result.005 file - promoters50/3439420
tgtttttaattc

SEQ ID NO: 184868 - DNA, 12 bp, Unknown
  misc_feature (1)..( 12): Result.005 file - promoters50/3439420
tgattttactat

SEQ ID NO: 184869 - DNA, 12 bp, Unknown
  misc_feature (1)..( 12): Result.005 file - promoters50/3439420
tgtatttgacga

SEQ ID NO: 184870 - DNA, 9 bp, Unknown
  misc_feature (1)..( 9): Result.005 file - promoters50/3439420
gcgccaaaa

SEQ ID NO: 184871 - DNA, 9 bp, Unknown
  misc_feature (1)..( 9): Result.005 file - promoters50/3439420
gcgtcaaaa

SEQ ID NO: 184872 - DNA, 9 bp, Unknown
  misc_feature (1)..( 9): Result.005 file - promoters50/3439420
ttgtccaaa

SEQ ID NO: 184873 - DNA, 11 bp, Unknown
  misc_feature (1)..( 11): Result.005 file - promoters50/3439457
cgaatttttgt

SEQ ID NO: 184874 - DNA, 11 bp, Unknown
  misc_feature (1)..( 11): Result.005 file - promoters50/3439457
tgaatttttgt

SEQ ID NO: 184875 - DNA, 11 bp, Unknown
  misc_feature (1)..( 11): Result.005 file - promoters50/3439457
tgattttttaa

SEQ ID NO: 184876 - DNA, 11 bp, Unknown
  misc_feature (1)..( 11): Result.005 file - promoters50/3439472
tcattttctta

SEQ ID NO: 184877 - DNA, 11 bp, Unknown
  misc_feature (1)..( 11): Result.005 file - promoters50/3439472
ccattttcaag

SEQ ID NO: 184878 - DNA, 11 bp, Unknown
  misc_feature (1)..( 11): Result.005 file - promoters50/3439472
ttattttcggc

SEQ ID NO: 184879 - DNA, 11 bp, Unknown
  misc_feature (1)..( 11): Result.005 file - promoters50/3439472
ccaatttgtaa

SEQ ID NO: 184880 - DNA, 11 bp, Unknown
  misc_feature (1)..( 11): Result.005 file - promoters50/3439472
tagttttccaa

SEQ ID NO: 184881 - DNA, 11 bp, Unknown
  misc_feature (1)..( 11): Result.005 file - promoters50/3439472
atattgtcaaa

SEQ ID NO: 184882 - DNA, 12 bp, Unknown
  misc_feature (1)..( 12): Result.005 file - promoters50/3439482
acgaaattagtg

SEQ ID NO: 184883 - DNA, 12 bp, Unknown
  misc_feature (1)..( 12): Result.005 file - promoters50/3439482
cacaaattaggc

SEQ ID NO: 184884 - DNA, 12 bp, Unknown
  misc_feature (1)..( 12): Result.005 file - promoters50/3439482
taaaaattatac

SEQ ID NO: 184885 - DNA, 12 bp, Unknown
  misc_feature (1)..( 12): Result.005 file - promoters50/3439482
cacagattctga

SEQ ID NO: 184886 - DNA, 12 bp, Unknown
  misc_feature (1)..( 12): Result.005 file - promoters50/3439482
ttcgaattcggc

SEQ ID NO: 184887 - DNA, 12 bp, Unknown
  misc_feature (1)..( 12): Result.005 file - promoters50/3439482
cactgattttta

SEQ ID NO: 184888 - DNA, 8 bp, Unknown
  misc_feature (1)..( 8): Result.005 file - promoters50/3439506
aaactgaa

SEQ ID NO: 184889 - DNA, 8 bp, Unknown
  misc_feature (1)..( 8): Result.005 file - promoters50/3439506
aaattgaa

SEQ ID NO: 184890 - DNA, 8 bp, Unknown
  misc_feature (1)..( 8): Result.005 file - promoters50/3439506
aaattgtt

SEQ ID NO: 184891 - DNA, 8 bp, Unknown
  misc_feature (1)..( 8): Result.005 file - promoters50/3439506
aaataaga

SEQ ID NO: 184892 - DNA, 8 bp, Unknown
  misc_feature (1)..( 8): Result.005 file - promoters50/3439506
aaaaaaga

SEQ ID NO: 184893 - DNA, 8 bp, Unknown
  misc_feature (1)..( 8): Result.005 file - promoters50/3439506
aaaggagg

SEQ ID NO: 184894 - DNA, 11 bp, Unknown
  misc_feature (1)..( 11): Result.005 file - promoters50/3439595
tgcttatataa

SEQ ID NO: 184895 - DNA, 11 bp, Unknown
  misc_feature (1)..( 11): Result.005 file - promoters50/3439595
cccttataaaa

SEQ ID NO: 184896 - DNA, 11 bp, Unknown
  misc_feature (1)..( 11): Result.005 file - promoters50/3439595
cccatataaaa

SEQ ID NO: 184897 - DNA, 11 bp, Unknown
  misc_feature (1)..( 11): Result.005 file - promoters50/3439595
ggcctataaaa

SEQ ID NO: 184898 - DNA, 11 bp, Unknown
  misc_feature (1)..( 11): Result.005 file - promoters50/3439595
gccttatcaga

SEQ ID NO: 184899 - DNA, 11 bp, Unknown
  misc_feature (1)..( 11): Result.005 file - promoters50/3439595
actatataaag

SEQ ID NO: 184900 - DNA, 9 bp, Unknown
  misc_feature (1)..( 9): Result.005 file - promoters50/3439605
atattaaat

SEQ ID NO: 184901 - DNA, 9 bp, Unknown
  misc_feature (1)..( 9): Result.005 file - promoters50/3439605
cgattaaat

SEQ ID NO: 184902 - DNA, 9 bp, Unknown
  misc_feature (1)..( 9): Result.005 file - promoters50/3439605
ataataatt

SEQ ID NO: 184903 - DNA, 9 bp, Unknown
  misc_feature (1)..( 9): Result.005 file - promoters50/3439605
cgattgaat

SEQ ID NO: 184904 - DNA, 10 bp, Unknown
  misc_feature (1)..( 10): Result.005 file - promoters50/3439605
tccgtataat

SEQ ID NO: 184905 - DNA, 9 bp, Unknown
  misc_feature (1)..( 9): Result.005 file - promoters50/3439614
caaagaaat

SEQ ID NO: 184906 - DNA, 9 bp, Unknown
  misc_feature (1)..( 9): Result.005 file - promoters50/3439614
gaaaaaaag

SEQ ID NO: 184907 - DNA, 9 bp, Unknown
  misc_feature (1)..( 9): Result.005 file - promoters50/3439614
taaataaat

SEQ ID NO: 184908 - DNA, 9 bp, Unknown
  misc_feature (1)..( 9): Result.005 file - promoters50/3439614
gagaaaaag

SEQ ID NO: 184909 - DNA, 9 bp, Unknown
  misc_feature (1)..( 9): Result.005 file - promoters50/3439614
caaaaaagg

SEQ ID NO: 184910 - DNA, 9 bp, Unknown
  misc_feature (1)..( 9): Result.005 file - promoters50/3439614
aagaagaag

SEQ ID NO: 184911 - DNA, 9 bp, Unknown
  misc_feature (1)..( 9): Result.005 file - promoters50/3439614
cagaaggtc

SEQ ID NO: 184912 - DNA, 9 bp, Unknown
  misc_feature (1)..( 9): Result.005 file - promoters50/3439637
aataaaata

SEQ ID NO: 184913 - DNA, 9 bp, Unknown
  misc_feature (1)..( 9): Result.005 file - promoters50/3439637
aatcaaata

SEQ ID NO: 184914 - DNA, 9 bp, Unknown
  misc_feature (1)..( 9): Result.005 file - promoters50/3439637
gataaaaaa

SEQ ID NO: 184915 - DNA, 9 bp, Unknown
  misc_feature (1)..( 9): Result.005 file - promoters50/3439637
caactttaa

SEQ ID NO: 184916 - DNA, 9 bp, Unknown
  misc_feature (1)..( 9): Result.005 file - promoters50/3439637
caaatttct

SEQ ID NO: 184917 - DNA, 9 bp, Unknown
  misc_feature (1)..( 9): Result.005 file - promoters50/3439637
aaaattcta

SEQ ID NO: 184918 - DNA, 8 bp, Unknown
  misc_feature (1)..( 8): Result.005 file - promoters50/3439637
caaagaca

SEQ ID NO: 184919 - DNA, 8 bp, Unknown
  misc_feature (1)..( 8): Result.005 file - promoters50/3439637
caaagaaa

SEQ ID NO: 184920 - DNA, 8 bp, Unknown
  misc_feature (1)..( 8): Result.005 file - promoters50/3439637
taaagaaa

SEQ ID NO: 184921 - DNA, 16 bp, Unknown
  misc_feature (1)..( 16): Result.005 file - promoters50/3439662
tttagaaaatgggatt

SEQ ID NO: 184922 - DNA, 16 bp, Unknown
  misc_feature (1)..( 16): Result.005 file - promoters50/3439662
atttgaaattggtaga

SEQ ID NO: 184923 - DNA, 17 bp, Unknown
  misc_feature (1)..( 17): Result.005 file - promoters50/3439662
gaaccaaaatcggattt

SEQ ID NO: 184924 - DNA, 17 bp, Unknown
  misc_feature (1)..( 17): Result.005 file - promoters50/3439662
acttgtaatacccagta

SEQ ID NO: 184925 - DNA, 17 bp, Unknown
  misc_feature (1)..( 17): Result.005 file - promoters50/3439662
attagaacttgggagaa

SEQ ID NO: 184926 - DNA, 17 bp, Unknown
  misc_feature (1)..( 17): Result.005 file - promoters50/3439662
atttgagagttcagaaa

SEQ ID NO: 184927 - DNA, 7 bp, Unknown
  misc_feature (1)..( 7): Result.005 file - promoters50/3439905
aaataat

SEQ ID NO: 184928 - DNA, 7 bp, Unknown
  misc_feature (1)..( 7): Result.005 file - promoters50/3439905
aaataaa

SEQ ID NO: 184929 - DNA, 7 bp, Unknown
  misc_feature (1)..( 7): Result.005 file - promoters50/3439905
taataat

SEQ ID NO: 184930 - DNA, 7 bp, Unknown
  misc_feature (1)..( 7): Result.005 file - promoters50/3439905
taaaaaa

SEQ ID NO: 184931 - DNA, 7 bp, Unknown
  misc_feature (1)..( 7): Result.005 file - promoters50/3439905
taaaaac

SEQ ID NO: 184932 - DNA, 7 bp, Unknown
  misc_feature (1)..( 7): Result.005 file - promoters50/3439905
taaaaaa

SEQ ID NO: 184933 - DNA, 8 bp, Unknown
  misc_feature (1)..( 8): Result.005 file - promoters50/3441755
tgtatata

SEQ ID NO: 184934 - DNA, 8 bp, Unknown
  misc_feature (1)..( 8): Result.005 file - promoters50/3441755
tgtttatt

SEQ ID NO: 184935 - DNA, 8 bp, Unknown
  misc_feature (1)..( 8): Result.005 file - promoters50/3441755
cttttatt

SEQ ID NO: 184936 - DNA, 8 bp, Unknown
  misc_feature (1)..( 8): Result.005 file - promoters50/3441755
ctgtgtct

SEQ ID NO: 184937 - DNA, 8 bp, Unknown
  misc_feature (1)..( 8): Result.005 file - promoters50/3441755
ctgtgttg

SEQ ID NO: 184938 - DNA, 8 bp, Unknown
  misc_feature (1)..( 8): Result.005 file - promoters50/3441755
ttgtcttg

SEQ ID NO: 184939 - DNA, 14 bp, Unknown
  misc_feature (1)..( 14): Result.005 file - promoters50/3442171
aaaatgtttgttgt

SEQ ID NO: 184940 - DNA, 14 bp, Unknown
  misc_feature (1)..( 14): Result.005 file - promoters50/3442171
cggcggttcgtttt

SEQ ID NO: 184941 - DNA, 14 bp, Unknown
  misc_feature (1)..( 14): Result.005 file - promoters50/3442171
aatttgtttgaata

SEQ ID NO: 184942 - DNA, 14 bp, Unknown
  misc_feature (1)..( 14): Result.005 file - promoters50/3442171
ttcaaacttgatgt

SEQ ID NO: 184943 - DNA, 14 bp, Unknown
  misc_feature (1)..( 14): Result.005 file - promoters50/3442171
tctttatttgcgtg

SEQ ID NO: 184944 - DNA, 14 bp, Unknown
  misc_feature (1)..( 14): Result.005 file - promoters50/3442171
aatatgttttggtt

SEQ ID NO: 184945 - DNA, 11 bp, Unknown
  misc_feature (1)..( 11): Result.005 file - promoters50/3442171
acagatgttta

SEQ ID NO: 184946 - DNA, 11 bp, Unknown
  misc_feature (1)..( 11): Result.005 file - promoters50/3442171
acatatgttac

SEQ ID NO: 184947 - DNA, 11 bp, Unknown
  misc_feature (1)..( 11): Result.005 file - promoters50/3442171
ttagatttttt

SEQ ID NO: 184948 - DNA, 12 bp, Unknown
  misc_feature (1)..( 12): Result.005 file - promoters50/3442171
ggagatttgtta

SEQ ID NO: 184949 - DNA, 12 bp, Unknown
  misc_feature (1)..( 12): Result.005 file - promoters50/3442171
tctaatttgttt

SEQ ID NO: 184950 - DNA, 12 bp, Unknown
  misc_feature (1)..( 12): Result.005 file - promoters50/3442171
atagattagcta

SEQ ID NO: 184951 - DNA, 12 bp, Unknown
  misc_feature (1)..( 12): Result.005 file - promoters50/3442171
tgtcattggtta

SEQ ID NO: 184952 - DNA, 8 bp, Unknown
  misc_feature (1)..( 8): Result.005 file - promoters50/3442286
aattaaaa

SEQ ID NO: 184953 - DNA, 8 bp, Unknown
  misc_feature (1)..( 8): Result.005 file - promoters50/3442286
aatcaaat

SEQ ID NO: 184954 - DNA, 8 bp, Unknown
  misc_feature (1)..( 8): Result.005 file - promoters50/3442286
cattaaat

SEQ ID NO: 184955 - DNA, 8 bp, Unknown
  misc_feature (1)..( 8): Result.005 file - promoters50/3442286
aattgaat

SEQ ID NO: 184956 - DNA, 9 bp, Unknown
  misc_feature (1)..( 9): Result.005 file - promoters50/3442286
taaaagaaa

SEQ ID NO: 184957 - DNA, 9 bp, Unknown
  misc_feature (1)..( 9): Result.005 file - promoters50/3442286
taaaaaaaa

SEQ ID NO: 184958 - DNA, 9 bp, Unknown
  misc_feature (1)..( 9): Result.005 file - promoters50/3442286
tgagaaaat

SEQ ID NO: 184959 - DNA, 11 bp, Unknown
  misc_feature (1)..( 11): Result.005 file - promoters50/3442286
cctcttaccat

SEQ ID NO: 184960 - DNA, 11 bp, Unknown
  misc_feature (1)..( 11): Result.005 file - promoters50/3442286
cctcttcctag

SEQ ID NO: 184961 - DNA, 11 bp, Unknown
  misc_feature (1)..( 11): Result.005 file - promoters50/3442286
gctcttcatag

SEQ ID NO: 184962 - DNA, 7 bp, Unknown
  misc_feature (1)..( 7): Result.005 file - promoters50/3442286
atgtttc

SEQ ID NO: 184963 - DNA, 7 bp, Unknown
  misc_feature (1)..( 7): Result.005 file - promoters50/3442286
ttgtttc

SEQ ID NO: 184964 - DNA, 7 bp, Unknown
  misc_feature (1)..( 7): Result.005 file - promoters50/3442286
ttgattc

SEQ ID NO: 184965 - DNA, 8 bp, Unknown
  misc_feature (1)..( 8): Result.005 file - promoters50/3442286
atataatt

SEQ ID NO: 184966 - DNA, 8 bp, Unknown
  misc_feature (1)..( 8): Result.005 file - promoters50/3442286
atatcatt

SEQ ID NO: 184967 - DNA, 8 bp, Unknown
  misc_feature (1)..( 8): Result.005 file - promoters50/3442286
atatcacc

SEQ ID NO: 184968 - DNA, 10 bp, Unknown
  misc_feature (1)..( 10): Result.005 file - promoters50/3442286
taaagttaat

SEQ ID NO: 184969 - DNA, 10 bp, Unknown
  misc_feature (1)..( 10): Result.005 file - promoters50/3442286
taatgttttc

SEQ ID NO: 184970 - DNA, 10 bp, Unknown
  misc_feature (1)..( 10): Result.005 file - promoters50/3442286
acatgttttc

SEQ ID NO: 184971 - DNA, 7 bp, Unknown
  misc_feature (1)..( 7): Result.005 file - promoters50/3442286
gtttctc

SEQ ID NO: 184972 - DNA, 7 bp, Unknown
  misc_feature (1)..( 7): Result.005 file - promoters50/3442286
gtttctc

SEQ ID NO: 184973 - DNA, 7 bp, Unknown
  misc_feature (1)..( 7): Result.005 file - promoters50/3442286
gtttctt

SEQ ID NO: 184974 - DNA, 9 bp, Unknown
  misc_feature (1)..( 9): Result.005 file - promoters50/3442286
catatttgc

SEQ ID NO: 184975 - DNA, 9 bp, Unknown
  misc_feature (1)..( 9): Result.005 file - promoters50/3442286
catgttttc

SEQ ID NO: 184976 - DNA, 9 bp, Unknown
  misc_feature (1)..( 9): Result.005 file - promoters50/3442286
aatgttttc

SEQ ID NO: 184977 - DNA, 7 bp, Unknown
  misc_feature (1)..( 7): Result.005 file - promoters50/3442286
caaaaat

SEQ ID NO: 184978 - DNA, 7 bp, Unknown
  misc_feature (1)..( 7): Result.005 file - promoters50/3442286
caaaaac

SEQ ID NO: 184979 - DNA, 7 bp, Unknown
  misc_feature (1)..( 7): Result.005 file - promoters50/3442286
gaaaaac

SEQ ID NO: 184980 - DNA, 9 bp, Unknown
  misc_feature (1)..( 9): Result.005 file - promoters50/3443646
atttattaa

SEQ ID NO: 184981 - DNA, 9 bp, Unknown
  misc_feature (1)..( 9): Result.005 file - promoters50/3443646
cgttaataa

SEQ ID NO: 184982 - DNA, 9 bp, Unknown
  misc_feature (1)..( 9): Result.005 file - promoters50/3443646
aattatttg

SEQ ID NO: 184983 - DNA, 7 bp, Unknown
  misc_feature (1)..( 7): Result.005 file - promoters50/3443646
atttaac

SEQ ID NO: 184984 - DNA, 7 bp, Unknown
  misc_feature (1)..( 7): Result.005 file - promoters50/3443646
atttaag

SEQ ID NO: 184985 - DNA, 7 bp, Unknown
  misc_feature (1)..( 7): Result.005 file - promoters50/3443646
ttttaag

SEQ ID NO: 184986 - DNA, 12 bp, Unknown
  misc_feature (1)..( 12): Result.005 file - promoters50/3443646
gatcaaaaagaa

SEQ ID NO: 184987 - DNA, 12 bp, Unknown
  misc_feature (1)..( 12): Result.005 file - promoters50/3443646
gatcaataagaa

SEQ ID NO: 184988 - DNA, 12 bp, Unknown
  misc_feature (1)..( 12): Result.005 file - promoters50/3443646
gatctaaaagct

SEQ ID NO: 184989 - DNA, 9 bp, Unknown
  misc_feature (1)..( 9): Result.005 file - promoters50/3443646
aataaatgt

SEQ ID NO: 184990 - DNA, 9 bp, Unknown
  misc_feature (1)..( 9): Result.005 file - promoters50/3443646
aataaagct

SEQ ID NO: 184991 - DNA, 9 bp, Unknown
  misc_feature (1)..( 9): Result.005 file - promoters50/3443646
gataatgct

SEQ ID NO: 184992 - DNA, 12 bp, Unknown
  misc_feature (1)..( 12): Result.005 file - promoters50/3445482
gtaagaaaaaaa

SEQ ID NO: 184993 - DNA, 12 bp, Unknown
  misc_feature (1)..( 12): Result.005 file - promoters50/3445482
caaagaaattcc

SEQ ID NO: 184994 - DNA, 12 bp, Unknown
  misc_feature (1)..( 12): Result.005 file - promoters50/3445482
agaataaaaaca

SEQ ID NO: 184995 - DNA, 12 bp, Unknown
  misc_feature (1)..( 12): Result.005 file - promoters50/3445482
agaagaaacaaa

SEQ ID NO: 184996 - DNA, 13 bp, Unknown
  misc_feature (1)..( 13): Result.005 file - promoters50/3445482
atgtccaaacaaa

SEQ ID NO: 184997 - DNA, 13 bp, Unknown
  misc_feature (1)..( 13): Result.005 file - promoters50/3445482
tcaatcaaatcgg

SEQ ID NO: 184998 - DNA, 9 bp, Unknown
  misc_feature (1)..( 9): Result.005 file - promoters50/3445482
aaaaaaaaa

SEQ ID NO: 184999 - DNA, 9 bp, Unknown
  misc_feature (1)..( 9): Result.005 file - promoters50/3445482
tgaaaaaaa

SEQ ID NO: 185000 - DNA, 10 bp, Unknown
  misc_feature (1)..( 10): Result.005 file - promoters50/3445482
agaataaaaa

SEQ ID NO: 185001 - DNA, 10 bp, Unknown
  misc_feature (1)..( 10): Result.005 file - promoters50/3445482
agaaacaaag

SEQ ID NO: 185002 - DNA, 10 bp, Unknown
  misc_feature (1)..( 10): Result.005 file - promoters50/3445482
tcaaaaaaat

SEQ ID NO: 185003 - DNA, 10 bp, Unknown
  misc_feature (1)..( 10): Result.005 file - promoters50/3445482
tcaatcaaat

SEQ ID NO: 185004 - DNA, 13 bp, Unknown
  misc_feature (1)..( 13): Result.005 file - promoters50/3445482
ctcgtataattct

SEQ ID NO: 185005 - DNA, 13 bp, Unknown
  misc_feature (1)..( 13): Result.005 file - promoters50/3445482
tgtgtatcattct

SEQ ID NO: 185006 - DNA, 13 bp, Unknown
  misc_feature (1)..( 13): Result.005 file - promoters50/3445482
ttcgtttaacaga

SEQ ID NO: 185007 - DNA, 13 bp, Unknown
  misc_feature (1)..( 13): Result.005 file - promoters50/3445482
ctcttatgatttg

SEQ ID NO: 185008 - DNA, 13 bp, Unknown
  misc_feature (1)..( 13): Result.005 file - promoters50/3445482
tttttttgtttct

SEQ ID NO: 185009 - DNA, 13 bp, Unknown
  misc_feature (1)..( 13): Result.005 file - promoters50/3445482
tgtttttgctgat

SEQ ID NO: 185010 - DNA, 8 bp, Unknown
  misc_feature (1)..( 8): Result.005 file - promoters50/3447843
aagattta

SEQ ID NO: 185011 - DNA, 8 bp, Unknown
  misc_feature (1)..( 8): Result.005 file - promoters50/3447843
aaggtttt

SEQ ID NO: 185012 - DNA, 8 bp, Unknown
  misc_feature (1)..( 8): Result.005 file - promoters50/3447843
cagatttt

SEQ ID NO: 185013 - DNA, 8 bp, Unknown
  misc_feature (1)..( 8): Result.005 file - promoters50/3447843
gagatttt

SEQ ID NO: 185014 - DNA, 8 bp, Unknown
  misc_feature (1)..( 8): Result.005 file - promoters50/3447843
aagattgt

SEQ ID NO: 185015 - DNA, 9 bp, Unknown
  misc_feature (1)..( 9): Result.005 file - promoters50/3447843
taggtgttg

SEQ ID NO: 185016 - DNA, 20 bp, Unknown
  misc_feature (1)..( 20): Result.005 file - promoters50/3593205
gcaattaattagatttttta

SEQ ID NO: 185017 - DNA, 20 bp, Unknown
  misc_feature (1)..( 20): Result.005 file - promoters50/3593205
tacaattattcgatcttttt

SEQ ID NO: 185018 - DNA, 20 bp, Unknown
  misc_feature (1)..( 20): Result.005 file - promoters50/3593205
ccaaaaaattggatccgaaa

SEQ ID NO: 185019 - DNA, 20 bp, Unknown
  misc_feature (1)..( 20): Result.005 file - promoters50/3593205
ataaattattatattgaatc

SEQ ID NO: 185020 - DNA, 20 bp, Unknown
  misc_feature (1)..( 20): Result.005 file - promoters50/3593205
catccatcggagatttgtta

SEQ ID NO: 185021 - DNA, 20 bp, Unknown
  misc_feature (1)..( 20): Result.005 file - promoters50/3593205
atgaacatagagatctttat

SEQ ID NO: 185022 - DNA, 20 bp, Unknown
  misc_feature (1)..( 20): Result.005 file - promoters50/3593205
ataaataattataaagtatt

SEQ ID NO: 185023 - DNA, 20 bp, Unknown
  misc_feature (1)..( 20): Result.005 file - promoters50/3593205
agaagccttctgatatgtcc

SEQ ID NO: 185024 - DNA, 15 bp, Unknown
  misc_feature (1)..( 15): Result.005 file - promoters50/3593205
aacaccaaaaaaaga

SEQ ID NO: 185025 - DNA, 15 bp, Unknown
  misc_feature (1)..( 15): Result.005 file - promoters50/3593205
ttattcaaaaatcta

SEQ ID NO: 185026 - DNA, 15 bp, Unknown
  misc_feature (1)..( 15): Result.005 file - promoters50/3593205
gaacactaaaaggag

SEQ ID NO: 185027 - DNA, 15 bp, Unknown
  misc_feature (1)..( 15): Result.005 file - promoters50/3593205
ttatccaataatcta

SEQ ID NO: 185028 - DNA, 15 bp, Unknown
  misc_feature (1)..( 15): Result.005 file - promoters50/3593205
gaatctaatacaact

SEQ ID NO: 185029 - DNA, 15 bp, Unknown
  misc_feature (1)..( 15): Result.005 file - promoters50/3593205
tgaaactaaaactgt

SEQ ID NO: 185030 - DNA, 16 bp, Unknown
  misc_feature (1)..( 16): Result.005 file - promoters50/3593205
tttgctcagatttctc

SEQ ID NO: 185031 - DNA, 16 bp, Unknown
  misc_feature (1)..( 16): Result.005 file - promoters50/3593205
aacccgaagatttatc

SEQ ID NO: 185032 - DNA, 16 bp, Unknown
  misc_feature (1)..( 16): Result.005 file - promoters50/3593205
tttgttcaaattcaaa

SEQ ID NO: 185033 - DNA, 16 bp, Unknown
  misc_feature (1)..( 16): Result.005 file - promoters50/3593205
taagctcagattagtt

SEQ ID NO: 185034 - DNA, 16 bp, Unknown
  misc_feature (1)..( 16): Result.005 file - promoters50/3593205
atgtcctagatatatc

SEQ ID NO: 185035 - DNA, 16 bp, Unknown
  misc_feature (1)..( 16): Result.005 file - promoters50/3593205
taaaataatatataat

SEQ ID NO: 185036 - DNA, 16 bp, Unknown
  misc_feature (1)..( 16): Result.005 file - promoters50/3593205
ttgaatcatataaaaa

SEQ ID NO: 185037 - DNA, 12 bp, Unknown
  misc_feature (1)..( 12): Result.005 file - promoters50/3593205
aactaatttagc

SEQ ID NO: 185038 - DNA, 12 bp, Unknown
  misc_feature (1)..( 12): Result.005 file - promoters50/3593205
aacttattttat

SEQ ID NO: 185039 - DNA, 12 bp, Unknown
  misc_feature (1)..( 12): Result.005 file - promoters50/3593205
atctattttgtc

SEQ ID NO: 185040 - DNA, 12 bp, Unknown
  misc_feature (1)..( 12): Result.005 file - promoters50/3593205
aaatattttatt

SEQ ID NO: 185041 - DNA, 12 bp, Unknown
  misc_feature (1)..( 12): Result.005 file - promoters50/3593205
aaggagtttatt

SEQ ID NO: 185042 - DNA, 12 bp, Unknown
  misc_feature (1)..( 12): Result.005 file - promoters50/3593205
gtaatatttatt

SEQ ID NO: 185043 - DNA, 11 bp, Unknown
  misc_feature (1)..( 11): Result.005 file - promoters50/3593230
gtcattcaatg

SEQ ID NO: 185044 - DNA, 11 bp, Unknown
  misc_feature (1)..( 11): Result.005 file - promoters50/3593230
cacattcatcc

SEQ ID NO: 185045 - DNA, 11 bp, Unknown
  misc_feature (1)..( 11): Result.005 file - promoters50/3593230
cacgttcttct

SEQ ID NO: 185046 - DNA, 11 bp, Unknown
  misc_feature (1)..( 11): Result.005 file - promoters50/3593230
tacatgttttt

SEQ ID NO: 185047 - DNA, 11 bp, Unknown
  misc_feature (1)..( 11): Result.005 file - promoters50/3593230
catatatatgt

SEQ ID NO: 185048 - DNA, 11 bp, Unknown
  misc_feature (1)..( 11): Result.005 file - promoters50/3593230
gttatatattc

SEQ ID NO: 185049 - DNA, 10 bp, Unknown
  misc_feature (1)..( 10): Result.005 file - promoters50/3593230
aagataataa

SEQ ID NO: 185050 - DNA, 10 bp, Unknown
  misc_feature (1)..( 10): Result.005 file - promoters50/3593230
cagaaaattc

SEQ ID NO: 185051 - DNA, 10 bp, Unknown
  misc_feature (1)..( 10): Result.005 file - promoters50/3593230
ctcaaacttc

SEQ ID NO: 185052 - DNA, 10 bp, Unknown
  misc_feature (1)..( 10): Result.005 file - promoters50/3593230
gtgaatatta

SEQ ID NO: 185053 - DNA, 10 bp, Unknown
  misc_feature (1)..( 10): Result.005 file - promoters50/3593230
cagaaatgaa

SEQ ID NO: 185054 - DNA, 10 bp, Unknown
  misc_feature (1)..( 10): Result.005 file - promoters50/3593230
tagatatggg

SEQ ID NO: 185055 - DNA, 10 bp, Unknown
  misc_feature (1)..( 10): Result.005 file - promoters50/3593243
aaagataaga

SEQ ID NO: 185056 - DNA, 10 bp, Unknown
  misc_feature (1)..( 10): Result.005 file - promoters50/3593243
aaacataatg

SEQ ID NO: 185057 - DNA, 10 bp, Unknown
  misc_feature (1)..( 10): Result.005 file - promoters50/3593243
cgtcattatg

SEQ ID NO: 185058 - DNA, 8 bp, Unknown
  misc_feature (1)..( 8): Result.005 file - promoters50/3593243
ttgtcttc

SEQ ID NO: 185059 - DNA, 8 bp, Unknown
  misc_feature (1)..( 8): Result.005 file - promoters50/3593243
ttgttttc

SEQ ID NO: 185060 - DNA, 8 bp, Unknown
  misc_feature (1)..( 8): Result.005 file - promoters50/3593243
ttgttttt

SEQ ID NO: 185061 - DNA, 9 bp, Unknown
  misc_feature (1)..( 9): Result.005 file - promoters50/3593243
taacacatg

SEQ ID NO: 185062 - DNA, 9 bp, Unknown
  misc_feature (1)..( 9): Result.005 file - promoters50/3593243
taatacata

SEQ ID NO: 185063 - DNA, 9 bp, Unknown
  misc_feature (1)..( 9): Result.005 file - promoters50/3593243
acatatata

SEQ ID NO: 185064 - DNA, 8 bp, Unknown
  misc_feature (1)..( 8): Result.005 file - promoters50/3593243
ccaaagtc

SEQ ID NO: 185065 - DNA, 8 bp, Unknown
  misc_feature (1)..( 8): Result.005 file - promoters50/3593243
ccaatgtc

SEQ ID NO: 185066 - DNA, 8 bp, Unknown
  misc_feature (1)..( 8): Result.005 file - promoters50/3593243
taaatgtc

SEQ ID NO: 185067 - DNA, 13 bp, Unknown
  misc_feature (1)..( 13): Result.005 file - promoters50/3593264
aaacaaaaaaaaa

SEQ ID NO: 185068 - DNA, 13 bp, Unknown
  misc_feature (1)..( 13): Result.005 file - promoters50/3593264
taggaaaaaaaaa

SEQ ID NO: 185069 - DNA, 13 bp, Unknown
  misc_feature (1)..( 13): Result.005 file - promoters50/3593264
aaacaagaaaaac

SEQ ID NO: 185070 - DNA, 13 bp, Unknown
  misc_feature (1)..( 13): Result.005 file - promoters50/3593264
ctccaaccaaaag

SEQ ID NO: 185071 - DNA, 13 bp, Unknown
  misc_feature (1)..( 13): Result.005 file - promoters50/3593264
aatatataaaaat

SEQ ID NO: 185072 - DNA, 13 bp, Unknown
  misc_feature (1)..( 13): Result.005 file - promoters50/3593264
atgcaagcaacct

SEQ ID NO: 185073 - DNA, 13 bp, Unknown
  misc_feature (1)..( 13): Result.005 file - promoters50/3593264
agtcaaacgattt

SEQ ID NO: 185074 - DNA, 7 bp, Unknown
  misc_feature (1)..( 7): Result.005 file - promoters50/3593264
aaaattc

SEQ ID NO: 185075 - DNA, 7 bp, Unknown
  misc_feature (1)..( 7): Result.005 file - promoters50/3593264
aaaattt

SEQ ID NO: 185076 - DNA, 8 bp, Unknown
  misc_feature (1)..( 8): Result.005 file - promoters50/3593264
aaacattt

SEQ ID NO: 185077 - DNA, 8 bp, Unknown
  misc_feature (1)..( 8): Result.005 file - promoters50/3593264
caaagtca

SEQ ID NO: 185078 - DNA, 8 bp, Unknown
  misc_feature (1)..( 8): Result.005 file - promoters50/3593264
aaaacttc

SEQ ID NO: 185079 - DNA, 8 bp, Unknown
  misc_feature (1)..( 8): Result.005 file - promoters50/3593264
taaaatta

SEQ ID NO: 185080 - DNA, 8 bp, Unknown
  misc_feature (1)..( 8): Result.005 file - promoters50/3593264
aacagttg

SEQ ID NO: 185081 - DNA, 10 bp, Unknown
  misc_feature (1)..( 10): Result.005 file - promoters50/3593264
gacataacaa

SEQ ID NO: 185082 - DNA, 10 bp, Unknown
  misc_feature (1)..( 10): Result.005 file - promoters50/3593264
cacataaact

SEQ ID NO: 185083 - DNA, 10 bp, Unknown
  misc_feature (1)..( 10): Result.005 file - promoters50/3593264
cacctaaccg

SEQ ID NO: 185084 - DNA, 10 bp, Unknown
  misc_feature (1)..( 10): Result.005 file - promoters50/3593264
aaccaaactc

SEQ ID NO: 185085 - DNA, 10 bp, Unknown
  misc_feature (1)..( 10): Result.005 file - promoters50/3593264
atcaaatcaa

SEQ ID NO: 185086 - DNA, 10 bp, Unknown
  misc_feature (1)..( 10): Result.005 file - promoters50/3593264
taactaaaat

SEQ ID NO: 185087 - DNA, 11 bp, Unknown
  misc_feature (1)..( 11): Result.005 file - promoters50/3593264
aattttgatta

SEQ ID NO: 185088 - DNA, 11 bp, Unknown
  misc_feature (1)..( 11): Result.005 file - promoters50/3593264
tggtttggtta

SEQ ID NO: 185089 - DNA, 11 bp, Unknown
  misc_feature (1)..( 11): Result.005 file - promoters50/3593264
tcttttgaagt

SEQ ID NO: 185090 - DNA, 11 bp, Unknown
  misc_feature (1)..( 11): Result.005 file - promoters50/3593264
cgttttgtttt

SEQ ID NO: 185091 - DNA, 11 bp, Unknown
  misc_feature (1)..( 11): Result.005 file - promoters50/3593264
tgttttgttct

SEQ ID NO: 185092 - DNA, 11 bp, Unknown
  misc_feature (1)..( 11): Result.005 file - promoters50/3593264
tgtttttctaa

SEQ ID NO: 185093 - DNA, 8 bp, Unknown
  misc_feature (1)..( 8): Result.005 file - promoters50/3593290
atttattt

SEQ ID NO: 185094 - DNA, 8 bp, Unknown
  misc_feature (1)..( 8): Result.005 file - promoters50/3593290
ttttgttt

SEQ ID NO: 185095 - DNA, 8 bp, Unknown
  misc_feature (1)..( 8): Result.005 file - promoters50/3593290
ttttgttg

SEQ ID NO: 185096 - DNA, 8 bp, Unknown
  misc_feature (1)..( 8): Result.005 file - promoters50/3593290
ctcggaat

SEQ ID NO: 185097 - DNA, 8 bp, Unknown
  misc_feature (1)..( 8): Result.005 file - promoters50/3593290
ctcagaag

SEQ ID NO: 185098 - DNA, 8 bp, Unknown
  misc_feature (1)..( 8): Result.005 file - promoters50/3593290
tccagaag

SEQ ID NO: 185099 - DNA, 15 bp, Unknown
  misc_feature (1)..( 15): Result.005 file - promoters50/3593290
gctcgttgtggccat

SEQ ID NO: 185100 - DNA, 15 bp, Unknown
  misc_feature (1)..( 15): Result.005 file - promoters50/3593290
gattgttgtgacgca

SEQ ID NO: 185101 - DNA, 15 bp, Unknown
  misc_feature (1)..( 15): Result.005 file - promoters50/3593290
gattgatgtagggta

SEQ ID NO: 185102 - DNA, 15 bp, Unknown
  misc_feature (1)..( 15): Result.005 file - promoters50/3593290
ggttattgaaattga

SEQ ID NO: 185103 - DNA, 10 bp, Unknown
  misc_feature (1)..( 10): Result.005 file - promoters50/3593290
taactttaga

SEQ ID NO: 185104 - DNA, 10 bp, Unknown
  misc_feature (1)..( 10): Result.005 file - promoters50/3593290
gagcttgaga

SEQ ID NO: 185105 - DNA, 10 bp, Unknown
  misc_feature (1)..( 10): Result.005 file - promoters50/3593290
gagattgagg

SEQ ID NO: 185106 - DNA, 8 bp, Unknown
  misc_feature (1)..( 8): Result.005 file - promoters50/3593346
aaagaaac

SEQ ID NO: 185107 - DNA, 8 bp, Unknown
  misc_feature (1)..( 8): Result.005 file - promoters50/3593346
aaacaaaa

SEQ ID NO: 185108 - DNA, 8 bp, Unknown
  misc_feature (1)..( 8): Result.005 file - promoters50/3593346
aaacaaat

SEQ ID NO: 185109 - DNA, 8 bp, Unknown
  misc_feature (1)..( 8): Result.005 file - promoters50/3593346
aaacaatt

SEQ ID NO: 185110 - DNA, 8 bp, Unknown
  misc_feature (1)..( 8): Result.005 file - promoters50/3593346
aaaaaata

SEQ ID NO: 185111 - DNA, 8 bp, Unknown
  misc_feature (1)..( 8): Result.005 file - promoters50/3593346
taacaaat

SEQ ID NO: 185112 - DNA, 8 bp, Unknown
  misc_feature (1)..( 8): Result.005 file - promoters50/3593538
aaacaaat

SEQ ID NO: 185113 - DNA, 8 bp, Unknown
  misc_feature (1)..( 8): Result.005 file - promoters50/3593538
aaacaaaa

SEQ ID NO: 185114 - DNA, 8 bp, Unknown
  misc_feature (1)..( 8): Result.005 file - promoters50/3593538
aaacaaaa

SEQ ID NO: 185115 - DNA, 10 bp, Unknown
  misc_feature (1)..( 10): Result.005 file - promoters50/3593538
agtcaataga

SEQ ID NO: 185116 - DNA, 10 bp, Unknown
  misc_feature (1)..( 10): Result.005 file - promoters50/3593538
aaacaaaaga

SEQ ID NO: 185117 - DNA, 10 bp, Unknown
  misc_feature (1)..( 10): Result.005 file - promoters50/3593538
aaacaaaaaa

SEQ ID NO: 185118 - DNA, 9 bp, Unknown
  misc_feature (1)..( 9): Result.005 file - promoters50/3593733
attaattga

SEQ ID NO: 185119 - DNA, 9 bp, Unknown
  misc_feature (1)..( 9): Result.005 file - promoters50/3593733
aataagtga

SEQ ID NO: 185120 - DNA, 9 bp, Unknown
  misc_feature (1)..( 9): Result.005 file - promoters50/3593733
aatgagtaa

SEQ ID NO: 185121 - DNA, 12 bp, Unknown
  misc_feature (1)..( 12): Result.005 file - promoters50/3593733
tagcaatcaatt

SEQ ID NO: 185122 - DNA, 12 bp, Unknown
  misc_feature (1)..( 12): Result.005 file - promoters50/3593733
acgcaaacaatt

SEQ ID NO: 185123 - DNA, 12 bp, Unknown
  misc_feature (1)..( 12): Result.005 file - promoters50/3593733
acgaaaatataa

SEQ ID NO: 185124 - DNA, 13 bp, Unknown
  misc_feature (1)..( 13): Result.005 file - promoters50/3594312
ttgtataaatcat

SEQ ID NO: 185125 - DNA, 13 bp, Unknown
  misc_feature (1)..( 13): Result.005 file - promoters50/3594312
gtttatgaatctg

SEQ ID NO: 185126 - DNA, 13 bp, Unknown
  misc_feature (1)..( 13): Result.005 file - promoters50/3594312
tcttataaagtca

SEQ ID NO: 185127 - DNA, 13 bp, Unknown
  misc_feature (1)..( 13): Result.005 file - promoters50/3594312
ttttgtaaatctt

SEQ ID NO: 185128 - DNA, 13 bp, Unknown
  misc_feature (1)..( 13): Result.005 file - promoters50/3594312
gtttctgaaacag

SEQ ID NO: 185129 - DNA, 13 bp, Unknown
  misc_feature (1)..( 13): Result.005 file - promoters50/3594312
tcctttgattctt

SEQ ID NO: 185130 - DNA, 13 bp, Unknown
  misc_feature (1)..( 13): Result.005 file - promoters50/3594312
gtatatcattctt

SEQ ID NO: 185131 - DNA, 9 bp, Unknown
  misc_feature (1)..( 9): Result.005 file - promoters50/3594312
aatcaaact

SEQ ID NO: 185132 - DNA, 9 bp, Unknown
  misc_feature (1)..( 9): Result.005 file - promoters50/3594312
aattaaaaa

SEQ ID NO: 185133 - DNA, 9 bp, Unknown
  misc_feature (1)..( 9): Result.005 file - promoters50/3594312
aatcaaata

SEQ ID NO: 185134 - DNA, 9 bp, Unknown
  misc_feature (1)..( 9): Result.005 file - promoters50/3594312
ttttaaaaa

SEQ ID NO: 185135 - DNA, 9 bp, Unknown
  misc_feature (1)..( 9): Result.005 file - promoters50/3594312
aattaatta

SEQ ID NO: 185136 - DNA, 9 bp, Unknown
  misc_feature (1)..( 9): Result.005 file - promoters50/3594312
cattaatgt

SEQ ID NO: 185137 - DNA, 11 bp, Unknown
  misc_feature (1)..( 11): Result.005 file - promoters50/3594312
catgattttgt

SEQ ID NO: 185138 - DNA, 11 bp, Unknown
  misc_feature (1)..( 11): Result.005 file - promoters50/3594312
catgatttaaa

SEQ ID NO: 185139 - DNA, 11 bp, Unknown
  misc_feature (1)..( 11): Result.005 file - promoters50/3594312
aaagatttttc

SEQ ID NO: 185140 - DNA, 11 bp, Unknown
  misc_feature (1)..( 11): Result.005 file - promoters50/3594312
attgattcaaa

SEQ ID NO: 185141 - DNA, 11 bp, Unknown
  misc_feature (1)..( 11): Result.005 file - promoters50/3594312
atacatttttt

SEQ ID NO: 185142 - DNA, 11 bp, Unknown
  misc_feature (1)..( 11): Result.005 file - promoters50/3594312
ctgaattttta

SEQ ID NO: 185143 - DNA, 9 bp, Unknown
  misc_feature (1)..( 9): Result.005 file - promoters50/3594312
gattttgtg

SEQ ID NO: 185144 - DNA, 9 bp, Unknown
  misc_feature (1)..( 9): Result.005 file - promoters50/3594312
tattatgtt

SEQ ID NO: 185145 - DNA, 9 bp, Unknown
  misc_feature (1)..( 9): Result.005 file - promoters50/3594312
acttttgtg

SEQ ID NO: 185146 - DNA, 9 bp, Unknown
  misc_feature (1)..( 9): Result.005 file - promoters50/3594312
gatttttct

SEQ ID NO: 185147 - DNA, 9 bp, Unknown
  misc_feature (1)..( 9): Result.005 file - promoters50/3594312
cattttttt

SEQ ID NO: 185148 - DNA, 9 bp, Unknown
  misc_feature (1)..( 9): Result.005 file - promoters50/3594312
aatttttat

SEQ ID NO: 185149 - DNA, 11 bp, Unknown
  misc_feature (1)..( 11): Result.005 file - promoters50/3594312
gtaaaattaaa

SEQ ID NO: 185150 - DNA, 11 bp, Unknown
  misc_feature (1)..( 11): Result.005 file - promoters50/3594312
gtataattttt

SEQ ID NO: 185151 - DNA, 11 bp, Unknown
  misc_feature (1)..( 11): Result.005 file - promoters50/3594312
aagaaatgaaa

SEQ ID NO: 185152 - DNA, 11 bp, Unknown
  misc_feature (1)..( 11): Result.005 file - promoters50/3594312
gtggaatattg

SEQ ID NO: 185153 - DNA, 11 bp, Unknown
  misc_feature (1)..( 11): Result.005 file - promoters50/3594312
aatgaatatat

SEQ ID NO: 185154 - DNA, 11 bp, Unknown
  misc_feature (1)..( 11): Result.005 file - promoters50/3594312
taatagtttaa

SEQ ID NO: 185155 - DNA, 9 bp, Unknown
  misc_feature (1)..( 9): Result.005 file - promoters50/3594312
agaaaaaat

SEQ ID NO: 185156 - DNA, 9 bp, Unknown
  misc_feature (1)..( 9): Result.005 file - promoters50/3594312
tttaaaaat

SEQ ID NO: 185157 - DNA, 9 bp, Unknown
  misc_feature (1)..( 9): Result.005 file - promoters50/3594312
tgcaaaaaa

SEQ ID NO: 185158 - DNA, 9 bp, Unknown
  misc_feature (1)..( 9): Result.005 file - promoters50/3594312
tgcaaaaac

SEQ ID NO: 185159 - DNA, 9 bp, Unknown
  misc_feature (1)..( 9): Result.005 file - promoters50/3594312
accaaaaaa

SEQ ID NO: 185160 - DNA, 9 bp, Unknown
  misc_feature (1)..( 9): Result.005 file - promoters50/3594312
aataaaaaa

SEQ ID NO: 185161 - DNA, 15 bp, Unknown
  misc_feature (1)..( 15): Result.005 file - promoters50/3594312
attgaagactataaa

SEQ ID NO: 185162 - DNA, 15 bp, Unknown
  misc_feature (1)..( 15): Result.005 file - promoters50/3594312
attaaagctccaata

SEQ ID NO: 185163 - DNA, 15 bp, Unknown
  misc_feature (1)..( 15): Result.005 file - promoters50/3594312
attaaaaatgctttt

SEQ ID NO: 185164 - DNA, 15 bp, Unknown
  misc_feature (1)..( 15): Result.005 file - promoters50/3594312
tttaaaaagcataaa

SEQ ID NO: 185165 - DNA, 15 bp, Unknown
  misc_feature (1)..( 15): Result.005 file - promoters50/3594312
aataaaaaaactgtt

SEQ ID NO: 185166 - DNA, 15 bp, Unknown
  misc_feature (1)..( 15): Result.005 file - promoters50/3594312
ccaaaaaaaaaaaaa

SEQ ID NO: 185167 - DNA, 15 bp, Unknown
  misc_feature (1)..( 15): Result.005 file - promoters50/3594312
tttaaaaattgttta

SEQ ID NO: 185168 - DNA, 11 bp, Unknown
  misc_feature (1)..( 11): Result.005 file - promoters50/3594312
ttctaaattac

SEQ ID NO: 185169 - DNA, 11 bp, Unknown
  misc_feature (1)..( 11): Result.005 file - promoters50/3594312
ttctatatttt

SEQ ID NO: 185170 - DNA, 12 bp, Unknown
  misc_feature (1)..( 12): Result.005 file - promoters50/3594312
tcaaatactttt

SEQ ID NO: 185171 - DNA, 12 bp, Unknown
  misc_feature (1)..( 12): Result.005 file - promoters50/3594312
aaaaaaacttta

SEQ ID NO: 185172 - DNA, 12 bp, Unknown
  misc_feature (1)..( 12): Result.005 file - promoters50/3594312
aaaaatgcttgt

SEQ ID NO: 185173 - DNA, 12 bp, Unknown
  misc_feature (1)..( 12): Result.005 file - promoters50/3594312
ataaaaaataaa

SEQ ID NO: 185174 - DNA, 10 bp, Unknown
  misc_feature (1)..( 10): Result.005 file - promoters50/3594312
aattactttc

SEQ ID NO: 185175 - DNA, 10 bp, Unknown
  misc_feature (1)..( 10): Result.005 file - promoters50/3594312
aaatactttt

SEQ ID NO: 185176 - DNA, 10 bp, Unknown
  misc_feature (1)..( 10): Result.005 file - promoters50/3594312
ctatattttt

SEQ ID NO: 185177 - DNA, 10 bp, Unknown
  misc_feature (1)..( 10): Result.005 file - promoters50/3594312
aaaaacttta

SEQ ID NO: 185178 - DNA, 10 bp, Unknown
  misc_feature (1)..( 10): Result.005 file - promoters50/3594312
aaatgcttgt

SEQ ID NO: 185179 - DNA, 10 bp, Unknown
  misc_feature (1)..( 10): Result.005 file - promoters50/3594312
aaaaaataaa

SEQ ID NO: 185180 - DNA, 10 bp, Unknown
  misc_feature (1)..( 10): Result.005 file - promoters50/3597145
cgaggaccac

SEQ ID NO: 185181 - DNA, 10 bp, Unknown
  misc_feature (1)..( 10): Result.005 file - promoters50/3597145
cgaagacgaa

SEQ ID NO: 185182 - DNA, 10 bp, Unknown
  misc_feature (1)..( 10): Result.005 file - promoters50/3597145
tgaagaagaa

SEQ ID NO: 185183 - DNA, 10 bp, Unknown
  misc_feature (1)..( 10): Result.005 file - promoters50/3597145
ggaagacaca

SEQ ID NO: 185184 - DNA, 10 bp, Unknown
  misc_feature (1)..( 10): Result.005 file - promoters50/3597145
cgaagaggaa

SEQ ID NO: 185185 - DNA, 10 bp, Unknown
  misc_feature (1)..( 10): Result.005 file - promoters50/3597145
agaagaaaac

SEQ ID NO: 185186 - DNA, 13 bp, Unknown
  misc_feature (1)..( 13): Result.005 file - promoters50/3597145
tgattttaacact

SEQ ID NO: 185187 - DNA, 13 bp, Unknown
  misc_feature (1)..( 13): Result.005 file - promoters50/3597145
atattataaaaaa

SEQ ID NO: 185188 - DNA, 13 bp, Unknown
  misc_feature (1)..( 13): Result.005 file - promoters50/3597145
cacttataagaga

SEQ ID NO: 185189 - DNA, 13 bp, Unknown
  misc_feature (1)..( 13): Result.005 file - promoters50/3597145
aactaatagccag

SEQ ID NO: 185190 - DNA, 13 bp, Unknown
  misc_feature (1)..( 13): Result.005 file - promoters50/3597145
atatgataatggt

SEQ ID NO: 185191 - DNA, 13 bp, Unknown
  misc_feature (1)..( 13): Result.005 file - promoters50/3597145
aacaaacaaattt

SEQ ID NO: 185192 - DNA, 13 bp, Unknown
  misc_feature (1)..( 13): Result.005 file - promoters50/3597145
gttcgccaaccaa

SEQ ID NO: 185193 - DNA, 13 bp, Unknown
  misc_feature (1)..( 13): Result.005 file - promoters50/3597145
gaaaaagttcaaa

SEQ ID NO: 185194 - DNA, 13 bp, Unknown
  misc_feature (1)..( 13): Result.005 file - promoters50/3597145
taaaaagccaaaa

SEQ ID NO: 185195 - DNA, 13 bp, Unknown
  misc_feature (1)..( 13): Result.005 file - promoters50/3597145
caaatagttcgcc

SEQ ID NO: 185196 - DNA, 13 bp, Unknown
  misc_feature (1)..( 13): Result.005 file - promoters50/3597145
taaaaaaactgtt

SEQ ID NO: 185197 - DNA, 13 bp, Unknown
  misc_feature (1)..( 13): Result.005 file - promoters50/3597145
tttatatttcgca

SEQ ID NO: 185198 - DNA, 13 bp, Unknown
  misc_feature (1)..( 13): Result.005 file - promoters50/3597145
tctgagcttcgca

SEQ ID NO: 185199 - DNA, 13 bp, Unknown
  misc_feature (1)..( 13): Result.005 file - promoters50/3597145
acaagatccgtaa

SEQ ID NO: 185200 - DNA, 13 bp, Unknown
  misc_feature (1)..( 13): Result.005 file - promoters50/3597145
ttttcttccataa

SEQ ID NO: 185201 - DNA, 13 bp, Unknown
  misc_feature (1)..( 13): Result.005 file - promoters50/3597145
tgattttctatat

SEQ ID NO: 185202 - DNA, 13 bp, Unknown
  misc_feature (1)..( 13): Result.005 file - promoters50/3597145
caactttcaataa

SEQ ID NO: 185203 - DNA, 13 bp, Unknown
  misc_feature (1)..( 13): Result.005 file - promoters50/3597145
ttttgttccattt

SEQ ID NO: 185204 - DNA, 13 bp, Unknown
  misc_feature (1)..( 13): Result.005 file - promoters50/3597145
tttggtttagtga

SEQ ID NO: 185205 - DNA, 8 bp, Unknown
  misc_feature (1)..( 8): Result.005 file - promoters50/3597158
acacttag

SEQ ID NO: 185206 - DNA, 8 bp, Unknown
  misc_feature (1)..( 8): Result.005 file - promoters50/3597158
tcacatag

SEQ ID NO: 185207 - DNA, 8 bp, Unknown
  misc_feature (1)..( 8): Result.005 file - promoters50/3597158
tcacatca

SEQ ID NO: 185208 - DNA, 10 bp, Unknown
  misc_feature (1)..( 10): Result.005 file - promoters50/3597158
tttcaaaagt

SEQ ID NO: 185209 - DNA, 10 bp, Unknown
  misc_feature (1)..( 10): Result.005 file - promoters50/3597158
tttccaaagc

SEQ ID NO: 185210 - DNA, 10 bp, Unknown
  misc_feature (1)..( 10): Result.005 file - promoters50/3597158
ccaacaaagc

SEQ ID NO: 185211 - DNA, 12 bp, Unknown
  misc_feature (1)..( 12): Result.005 file - promoters50/3597158
attcagtttcac

SEQ ID NO: 185212 - DNA, 12 bp, Unknown
  misc_feature (1)..( 12): Result.005 file - promoters50/3597158
tcatagttccac

SEQ ID NO: 185213 - DNA, 12 bp, Unknown
  misc_feature (1)..( 12): Result.005 file - promoters50/3597158
attcactttcat

SEQ ID NO: 185214 - DNA, 10 bp, Unknown
  misc_feature (1)..( 10): Result.005 file - promoters50/3597158
aaaagaaaaa

SEQ ID NO: 185215 - DNA, 10 bp, Unknown
  misc_feature (1)..( 10): Result.005 file - promoters50/3597158
caaagcaaaa

SEQ ID NO: 185216 - DNA, 10 bp, Unknown
  misc_feature (1)..( 10): Result.005 file - promoters50/3597158
caaagctttt

SEQ ID NO: 185217 - DNA, 7 bp, Unknown
  misc_feature (1)..( 7): Result.005 file - promoters50/3597162
tgacttt

SEQ ID NO: 185218 - DNA, 7 bp, Unknown
  misc_feature (1)..( 7): Result.005 file - promoters50/3597162
tgacttg

SEQ ID NO: 185219 - DNA, 7 bp, Unknown
  misc_feature (1)..( 7): Result.005 file - promoters50/3597162
tgaattg

SEQ ID NO: 185220 - DNA, 8 bp, Unknown
  misc_feature (1)..( 8): Result.005 file - promoters50/3597162
agaaaaaa

SEQ ID NO: 185221 - DNA, 8 bp, Unknown
  misc_feature (1)..( 8): Result.005 file - promoters50/3597162
agataaaa

SEQ ID NO: 185222 - DNA, 8 bp, Unknown
  misc_feature (1)..( 8): Result.005 file - promoters50/3597162
agataaat

SEQ ID NO: 185223 - DNA, 7 bp, Unknown
  misc_feature (1)..( 7): Result.005 file - promoters50/3597162
aatagat

SEQ ID NO: 185224 - DNA, 7 bp, Unknown
  misc_feature (1)..( 7): Result.005 file - promoters50/3597162
aattgat

SEQ ID NO: 185225 - DNA, 7 bp, Unknown
  misc_feature (1)..( 7): Result.005 file - promoters50/3597162
aatagaa

SEQ ID NO: 185226 - DNA, 13 bp, Unknown
  misc_feature (1)..( 13): Result.005 file - promoters50/3597162
tctatataaatcc

SEQ ID NO: 185227 - DNA, 13 bp, Unknown
  misc_feature (1)..( 13): Result.005 file - promoters50/3597162
taaatagaaaacg

SEQ ID NO: 185228 - DNA, 13 bp, Unknown
  misc_feature (1)..( 13): Result.005 file - promoters50/3597162
tctatatatatcc

SEQ ID NO: 185229 - DNA, 9 bp, Unknown
  misc_feature (1)..( 9): Result.005 file - promoters50/3597162
ttaaaattg

SEQ ID NO: 185230 - DNA, 9 bp, Unknown
  misc_feature (1)..( 9): Result.005 file - promoters50/3597162
ttagaatag

SEQ ID NO: 185231 - DNA, 9 bp, Unknown
  misc_feature (1)..( 9): Result.005 file - promoters50/3597162
gaaaaatgg

SEQ ID NO: 185232 - DNA, 9 bp, Unknown
  misc_feature (1)..( 9): Result.005 file - promoters50/3597162
ttcaataga

SEQ ID NO: 185233 - DNA, 9 bp, Unknown
  misc_feature (1)..( 9): Result.005 file - promoters50/3597162
ttcaattta

SEQ ID NO: 185234 - DNA, 9 bp, Unknown
  misc_feature (1)..( 9): Result.005 file - promoters50/3597162
ctcatttta

SEQ ID NO: 185235 - DNA, 9 bp, Unknown
  misc_feature (1)..( 9): Result.005 file - promoters50/3597162
tgtatttta

SEQ ID NO: 185236 - DNA, 9 bp, Unknown
  misc_feature (1)..( 9): Result.005 file - promoters50/3597162
ttttatttt

SEQ ID NO: 185237 - DNA, 9 bp, Unknown
  misc_feature (1)..( 9): Result.005 file - promoters50/3597162
ttttttttt

SEQ ID NO: 185238 - DNA, 9 bp, Unknown
  misc_feature (1)..( 9): Result.005 file - promoters50/3597162
atttatttg

SEQ ID NO: 185239 - DNA, 11 bp, Unknown
  misc_feature (1)..( 11): Result.005 file - promoters50/3597162
actttcaattc

SEQ ID NO: 185240 - DNA, 11 bp, Unknown
  misc_feature (1)..( 11): Result.005 file - promoters50/3597162
aatttgaattg

SEQ ID NO: 185241 - DNA, 11 bp, Unknown
  misc_feature (1)..( 11): Result.005 file - promoters50/3597162
attatgacttg

SEQ ID NO: 185242 - DNA, 11 bp, Unknown
  misc_feature (1)..( 11): Result.005 file - promoters50/3597162
aatatgagata

SEQ ID NO: 185243 - DNA, 13 bp, Unknown
  misc_feature (1)..( 13): Result.005 file - promoters50/3597162
gtttaaacttaaa

SEQ ID NO: 185244 - DNA, 13 bp, Unknown
  misc_feature (1)..( 13): Result.005 file - promoters50/3597162
aaataaacttaat

SEQ ID NO: 185245 - DNA, 13 bp, Unknown
  misc_feature (1)..( 13): Result.005 file - promoters50/3597162
gttaaaaattaaa

SEQ ID NO: 185246 - DNA, 9 bp, Unknown
  misc_feature (1)..( 9): Result.005 file - promoters50/3597162
tgataaaat

SEQ ID NO: 185247 - DNA, 9 bp, Unknown
  misc_feature (1)..( 9): Result.005 file - promoters50/3597162
aaataaaaa

SEQ ID NO: 185248 - DNA, 9 bp, Unknown
  misc_feature (1)..( 9): Result.005 file - promoters50/3597162
aaagaaaat

SEQ ID NO: 185249 - DNA, 9 bp, Unknown
  misc_feature (1)..( 9): Result.005 file - promoters50/3597162
agttaaaaa

SEQ ID NO: 185250 - DNA, 10 bp, Unknown
  misc_feature (1)..( 10): Result.005 file - promoters50/3597162
aaagaaaatt

SEQ ID NO: 185251 - DNA, 10 bp, Unknown
  misc_feature (1)..( 10): Result.005 file - promoters50/3597162
atagaaaatt

SEQ ID NO: 185252 - DNA, 10 bp, Unknown
  misc_feature (1)..( 10): Result.005 file - promoters50/3597162
aaataaaaaa

SEQ ID NO: 185253 - DNA, 14 bp, Unknown
  misc_feature (1)..( 14): Result.005 file - promoters50/3597175
cgccaaaaaaaata

SEQ ID NO: 185254 - DNA, 14 bp, Unknown
  misc_feature (1)..( 14): Result.005 file - promoters50/3597175
acccaaaattgacc

SEQ ID NO: 185255 - DNA, 14 bp, Unknown
  misc_feature (1)..( 14): Result.005 file - promoters50/3597175
aaccaaaaataata

SEQ ID NO: 185256 - DNA, 14 bp, Unknown
  misc_feature (1)..( 14): Result.005 file - promoters50/3597175
aactaaacactgga

SEQ ID NO: 185257 - DNA, 14 bp, Unknown
  misc_feature (1)..( 14): Result.005 file - promoters50/3597175
aactatacaaagag

SEQ ID NO: 185258 - DNA, 14 bp, Unknown
  misc_feature (1)..( 14): Result.005 file - promoters50/3597175
ttcgaaataaatga

SEQ ID NO: 185259 - DNA, 16 bp, Unknown
  misc_feature (1)..( 16): Result.005 file - promoters50/3597175
attattttttactcgt

SEQ ID NO: 185260 - DNA, 16 bp, Unknown
  misc_feature (1)..( 16): Result.005 file - promoters50/3597175
attcttttccatccac

SEQ ID NO: 185261 - DNA, 16 bp, Unknown
  misc_feature (1)..( 16): Result.005 file - promoters50/3597175
tttcatttatttacaa

SEQ ID NO: 185262 - DNA, 16 bp, Unknown
  misc_feature (1)..( 16): Result.005 file - promoters50/3597175
gtaattttattataaa

SEQ ID NO: 185263 - DNA, 16 bp, Unknown
  misc_feature (1)..( 16): Result.005 file - promoters50/3597175
acttttttgttagaaa

SEQ ID NO: 185264 - DNA, 16 bp, Unknown
  misc_feature (1)..( 16): Result.005 file - promoters50/3597175
ttaaatttaaaaattc

SEQ ID NO: 185265 - DNA, 16 bp, Unknown
  misc_feature (1)..( 16): Result.005 file - promoters50/3597175
gttattaattagtctt

SEQ ID NO: 185266 - DNA, 11 bp, Unknown
  misc_feature (1)..( 11): Result.005 file - promoters50/3597175
tttaattaaaa

SEQ ID NO: 185267 - DNA, 11 bp, Unknown
  misc_feature (1)..( 11): Result.005 file - promoters50/3597175
cctaattaacc

SEQ ID NO: 185268 - DNA, 11 bp, Unknown
  misc_feature (1)..( 11): Result.005 file - promoters50/3597175
gagaattaaaa

SEQ ID NO: 185269 - DNA, 11 bp, Unknown
  misc_feature (1)..( 11): Result.005 file - promoters50/3597175
tctaattactg

SEQ ID NO: 185270 - DNA, 11 bp, Unknown
  misc_feature (1)..( 11): Result.005 file - promoters50/3597175
tttaattttcg

SEQ ID NO: 185271 - DNA, 11 bp, Unknown
  misc_feature (1)..( 11): Result.005 file - promoters50/3597175
atgaattacca

SEQ ID NO: 185272 - DNA, 12 bp, Unknown
  misc_feature (1)..( 12): Result.005 file - promoters50/3597175
tctcatatataa

SEQ ID NO: 185273 - DNA, 12 bp, Unknown
  misc_feature (1)..( 12): Result.005 file - promoters50/3597175
tataataaatac

SEQ ID NO: 185274 - DNA, 12 bp, Unknown
  misc_feature (1)..( 12): Result.005 file - promoters50/3597175
tcttatatattc

SEQ ID NO: 185275 - DNA, 12 bp, Unknown
  misc_feature (1)..( 12): Result.005 file - promoters50/3597175
aaatataaataa

SEQ ID NO: 185276 - DNA, 12 bp, Unknown
  misc_feature (1)..( 12): Result.005 file - promoters50/3597175
gcctttaaaaaa

SEQ ID NO: 185277 - DNA, 12 bp, Unknown
  misc_feature (1)..( 12): Result.005 file - promoters50/3597175
ctatttaagtaa

SEQ ID NO: 185278 - DNA, 10 bp, Unknown
  misc_feature (1)..( 10): Result.005 file - promoters50/3597175
acataaatct

SEQ ID NO: 185279 - DNA, 10 bp, Unknown
  misc_feature (1)..( 10): Result.005 file - promoters50/3597175
tcataaattt

SEQ ID NO: 185280 - DNA, 10 bp, Unknown
  misc_feature (1)..( 10): Result.005 file - promoters50/3597175
aaataaatcg

SEQ ID NO: 185281 - DNA, 10 bp, Unknown
  misc_feature (1)..( 10): Result.005 file - promoters50/3597175
aaataaacta

SEQ ID NO: 185282 - DNA, 10 bp, Unknown
  misc_feature (1)..( 10): Result.005 file - promoters50/3597175
taatgaacca

SEQ ID NO: 185283 - DNA, 10 bp, Unknown
  misc_feature (1)..( 10): Result.005 file - promoters50/3597175
taataagttt

SEQ ID NO: 185284 - DNA, 11 bp, Unknown
  misc_feature (1)..( 11): Result.005 file - promoters50/3597175
ccaaaattgac

SEQ ID NO: 185285 - DNA, 11 bp, Unknown
  misc_feature (1)..( 11): Result.005 file - promoters50/3597175
ataaatttgtc

SEQ ID NO: 185286 - DNA, 11 bp, Unknown
  misc_feature (1)..( 11): Result.005 file - promoters50/3597175
gtaaaattttt

SEQ ID NO: 185287 - DNA, 11 bp, Unknown
  misc_feature (1)..( 11): Result.005 file - promoters50/3597175
ggaaactttat

SEQ ID NO: 185288 - DNA, 11 bp, Unknown
  misc_feature (1)..( 11): Result.005 file - promoters50/3597175
ataagtttata

SEQ ID NO: 185289 - DNA, 11 bp, Unknown
  misc_feature (1)..( 11): Result.005 file - promoters50/3597175
gtgaattagtt

SEQ ID NO: 185290 - DNA, 11 bp, Unknown
  misc_feature (1)..( 11): Result.005 file - promoters50/3597175
ttatgaaaaca

SEQ ID NO: 185291 - DNA, 11 bp, Unknown
  misc_feature (1)..( 11): Result.005 file - promoters50/3597175
ttaagaagagt

SEQ ID NO: 185292 - DNA, 11 bp, Unknown
  misc_feature (1)..( 11): Result.005 file - promoters50/3597175
ataataagttt

SEQ ID NO: 185293 - DNA, 11 bp, Unknown
  misc_feature (1)..( 11): Result.005 file - promoters50/3597175
gtcataaattt

SEQ ID NO: 185294 - DNA, 11 bp, Unknown
  misc_feature (1)..( 11): Result.005 file - promoters50/3597175
tgaattagtta

SEQ ID NO: 185295 - DNA, 11 bp, Unknown
  misc_feature (1)..( 11): Result.005 file - promoters50/3597175
ttcacaaaaga

SEQ ID NO: 185296 - DNA, 8 bp, Unknown
  misc_feature (1)..( 8): Result.005 file - promoters50/3598435
gctgctga

SEQ ID NO: 185297 - DNA, 8 bp, Unknown
  misc_feature (1)..( 8): Result.005 file - promoters50/3598435
cttgctga

SEQ ID NO: 185298 - DNA, 8 bp, Unknown
  misc_feature (1)..( 8): Result.005 file - promoters50/3598435
cttcctgg

SEQ ID NO: 185299 - DNA, 12 bp, Unknown
  misc_feature (1)..( 12): Result.005 file - promoters50/3598435
tctatggtgtta

SEQ ID NO: 185300 - DNA, 12 bp, Unknown
  misc_feature (1)..( 12): Result.005 file - promoters50/3598435
tctttggttgtg

SEQ ID NO: 185301 - DNA, 12 bp, Unknown
  misc_feature (1)..( 12): Result.005 file - promoters50/3598435
aatttgcttgtg

SEQ ID NO: 185302 - DNA, 8 bp, Unknown
  misc_feature (1)..( 8): Result.005 file - promoters50/3598610
gttgcatt

SEQ ID NO: 185303 - DNA, 8 bp, Unknown
  misc_feature (1)..( 8): Result.005 file - promoters50/3598610
attggatt

SEQ ID NO: 185304 - DNA, 8 bp, Unknown
  misc_feature (1)..( 8): Result.005 file - promoters50/3598610
attggatc

SEQ ID NO: 185305 - DNA, 6 bp, Unknown
  misc_feature (1)..( 6): Result.005 file - promoters50/3600084
tccaaa

SEQ ID NO: 185306 - DNA, 6 bp, Unknown
  misc_feature (1)..( 6): Result.005 file - promoters50/3600084
tccaaa

SEQ ID NO: 185307 - DNA, 7 bp, Unknown
  misc_feature (1)..( 7): Result.005 file - promoters50/3600084
tcctaaa

SEQ ID NO: 185308 - DNA, 7 bp, Unknown
  misc_feature (1)..( 7): Result.005 file - promoters50/3600084
ttacaaa

SEQ ID NO: 185309 - DNA, 7 bp, Unknown
  misc_feature (1)..( 7): Result.005 file - promoters50/3600084
ttaaaaa

SEQ ID NO: 185310 - DNA, 7 bp, Unknown
  misc_feature (1)..( 7): Result.005 file - promoters50/3600084
ctaaaaa

SEQ ID NO: 185311 - DNA, 10 bp, Unknown
  misc_feature (1)..( 10): Result.005 file - promoters50/3611292
aaacataaaa

SEQ ID NO: 185312 - DNA, 10 bp, Unknown
  misc_feature (1)..( 10): Result.005 file - promoters50/3611292
ttacaaaaaa

SEQ ID NO: 185313 - DNA, 10 bp, Unknown
  misc_feature (1)..( 10): Result.005 file - promoters50/3611292
ttactaaaag

SEQ ID NO: 185314 - DNA, 10 bp, Unknown
  misc_feature (1)..( 10): Result.005 file - promoters50/3611292
gaactaaact

SEQ ID NO: 185315 - DNA, 10 bp, Unknown
  misc_feature (1)..( 10): Result.005 file - promoters50/3611292
ttactaaggt

SEQ ID NO: 185316 - DNA, 10 bp, Unknown
  misc_feature (1)..( 10): Result.005 file - promoters50/3611292
aaactaagct

SEQ ID NO: 185317 - DNA, 11 bp, Unknown
  misc_feature (1)..( 11): Result.005 file - promoters50/3611292
ttaaaatcatc

SEQ ID NO: 185318 - DNA, 11 bp, Unknown
  misc_feature (1)..( 11): Result.005 file - promoters50/3611292
ataaaatttca

SEQ ID NO: 185319 - DNA, 11 bp, Unknown
  misc_feature (1)..( 11): Result.005 file - promoters50/3611292
ttaaaagtaaa

SEQ ID NO: 185320 - DNA, 11 bp, Unknown
  misc_feature (1)..( 11): Result.005 file - promoters50/3611292
ataaaatacaa

SEQ ID NO: 185321 - DNA, 11 bp, Unknown
  misc_feature (1)..( 11): Result.005 file - promoters50/3611292
atataatcaag

SEQ ID NO: 185322 - DNA, 11 bp, Unknown
  misc_feature (1)..( 11): Result.005 file - promoters50/3611292
ataacagttgt

SEQ ID NO: 185323 - DNA, 11 bp, Unknown
  misc_feature (1)..( 11): Result.005 file - promoters50/3611292
tcaaactttca

SEQ ID NO: 185324 - DNA, 13 bp, Unknown
  misc_feature (1)..( 13): Result.005 file - promoters50/3611292
ccaagaaattcat

SEQ ID NO: 185325 - DNA, 13 bp, Unknown
  misc_feature (1)..( 13): Result.005 file - promoters50/3611292
gcaaaaaaatcaa

SEQ ID NO: 185326 - DNA, 13 bp, Unknown
  misc_feature (1)..( 13): Result.005 file - promoters50/3611292
aaaaaaaggaaaa

SEQ ID NO: 185327 - DNA, 13 bp, Unknown
  misc_feature (1)..( 13): Result.005 file - promoters50/3611292
ggaaaaaagaaat

SEQ ID NO: 185328 - DNA, 13 bp, Unknown
  misc_feature (1)..( 13): Result.005 file - promoters50/3611292
tcaaaaaattatt

SEQ ID NO: 185329 - DNA, 14 bp, Unknown
  misc_feature (1)..( 14): Result.005 file - promoters50/3611292
ttaaacaaacgaca

SEQ ID NO: 185330 - DNA, 14 bp, Unknown
  misc_feature (1)..( 14): Result.005 file - promoters50/3611292
ggtgataaatattc

SEQ ID NO: 185331 - DNA, 8 bp, Unknown
  misc_feature (1)..( 8): Result.005 file - promoters50/3629913
tactgaat

SEQ ID NO: 185332 - DNA, 8 bp, Unknown
  misc_feature (1)..( 8): Result.005 file - promoters50/3629913
tacagaat

SEQ ID NO: 185333 - DNA, 8 bp, Unknown
  misc_feature (1)..( 8): Result.005 file - promoters50/3629913
aactgaag

SEQ ID NO: 185334 - DNA, 7 bp, Unknown
  misc_feature (1)..( 7): Result.005 file - promoters50/3629913
caaatgt

SEQ ID NO: 185335 - DNA, 7 bp, Unknown
  misc_feature (1)..( 7): Result.005 file - promoters50/3629913
caaatgc

SEQ ID NO: 185336 - DNA, 7 bp, Unknown
  misc_feature (1)..( 7): Result.005 file - promoters50/3629913
aaaatgt

SEQ ID NO: 185337 - DNA, 11 bp, Unknown
  misc_feature (1)..( 11): Result.005 file - promoters50/3631200
agaagatggct

SEQ ID NO: 185338 - DNA, 11 bp, Unknown
  misc_feature (1)..( 11): Result.005 file - promoters50/3631200
agaatatgata

SEQ ID NO: 185339 - DNA, 11 bp, Unknown
  misc_feature (1)..( 11): Result.005 file - promoters50/3631200
ctaatctgata

SEQ ID NO: 185340 - DNA, 8 bp, Unknown
  misc_feature (1)..( 8): Result.005 file - promoters50/3631200
aagctata

SEQ ID NO: 185341 - DNA, 8 bp, Unknown
  misc_feature (1)..( 8): Result.005 file - promoters50/3631200
tagctata

SEQ ID NO: 185342 - DNA, 8 bp, Unknown
  misc_feature (1)..( 8): Result.005 file - promoters50/3631200
aagctaga

SEQ ID NO: 185343 - DNA, 9 bp, Unknown
  misc_feature (1)..( 9): Result.005 file - promoters50/3631200
cttagattg

SEQ ID NO: 185344 - DNA, 9 bp, Unknown
  misc_feature (1)..( 9): Result.005 file - promoters50/3631200
ctttgatga

SEQ ID NO: 185345 - DNA, 9 bp, Unknown
  misc_feature (1)..( 9): Result.005 file - promoters50/3631200
cttacattg

SEQ ID NO: 185346 - DNA, 8 bp, Unknown
  misc_feature (1)..( 8): Result.005 file - promoters50/3659211
ataaatta

SEQ ID NO: 185347 - DNA, 8 bp, Unknown
  misc_feature (1)..( 8): Result.005 file - promoters50/3659211
ataaatag

SEQ ID NO: 185348 - DNA, 8 bp, Unknown
  misc_feature (1)..( 8): Result.005 file - promoters50/3659211
ataaatta

SEQ ID NO: 185349 - DNA, 11 bp, Unknown
  misc_feature (1)..( 11): Result.005 file - promoters50/4254292
attaattaaat

SEQ ID NO: 185350 - DNA, 11 bp, Unknown
  misc_feature (1)..( 11): Result.005 file - promoters50/4254292
gaggattaaag

SEQ ID NO: 185351 - DNA, 11 bp, Unknown
  misc_feature (1)..( 11): Result.005 file - promoters50/4254292
actaattaatg

SEQ ID NO: 185352 - DNA, 11 bp, Unknown
  misc_feature (1)..( 11): Result.005 file - promoters50/4254292
aacaattaagt

SEQ ID NO: 185353 - DNA, 11 bp, Unknown
  misc_feature (1)..( 11): Result.005 file - promoters50/4254292
gccgatgaaag

SEQ ID NO: 185354 - DNA, 11 bp, Unknown
  misc_feature (1)..( 11): Result.005 file - promoters50/4254292
actgatttttc

SEQ ID NO: 185355 - DNA, 12 bp, Unknown
  misc_feature (1)..( 12): Result.005 file - promoters50/4254292
tttttatttttt

SEQ ID NO: 185356 - DNA, 12 bp, Unknown
  misc_feature (1)..( 12): Result.005 file - promoters50/4254292
ctttgattagca

SEQ ID NO: 185357 - DNA, 13 bp, Unknown
  misc_feature (1)..( 13): Result.005 file - promoters50/4254292
ccattactttact

SEQ ID NO: 185358 - DNA, 13 bp, Unknown
  misc_feature (1)..( 13): Result.005 file - promoters50/4254292
tttttagtttgtg

SEQ ID NO: 185359 - DNA, 14 bp, Unknown
  misc_feature (1)..( 14): Result.005 file - promoters50/4254292
aatttatattttta

SEQ ID NO: 185360 - DNA, 14 bp, Unknown
  misc_feature (1)..( 14): Result.005 file - promoters50/4254292
ccaacaactataca

SEQ ID NO: 185361 - DNA, 14 bp, Unknown
  misc_feature (1)..( 14): Result.005 file - promoters50/4254292
tcacaacattgctt

SEQ ID NO: 185362 - DNA, 9 bp, Unknown
  misc_feature (1)..( 9): Result.005 file - promoters50/4254292
ctaaaagcg

SEQ ID NO: 185363 - DNA, 9 bp, Unknown
  misc_feature (1)..( 9): Result.005 file - promoters50/4254292
ctaaaaaaa

SEQ ID NO: 185364 - DNA, 9 bp, Unknown
  misc_feature (1)..( 9): Result.005 file - promoters50/4254292
ttaaaaaag

SEQ ID NO: 185365 - DNA, 9 bp, Unknown
  misc_feature (1)..( 9): Result.005 file - promoters50/4254292
ataagaaat

SEQ ID NO: 185366 - DNA, 9 bp, Unknown
  misc_feature (1)..( 9): Result.005 file - promoters50/4254292
acaaaaaga

SEQ ID NO: 185367 - DNA, 9 bp, Unknown
  misc_feature (1)..( 9): Result.005 file - promoters50/4254292
tcaagaaaa

SEQ ID NO: 185368 - DNA, 12 bp, Unknown
  misc_feature (1)..( 12): Result.005 file - promoters50/4254299
attttttttctt

SEQ ID NO: 185369 - DNA, 12 bp, Unknown
  misc_feature (1)..( 12): Result.005 file - promoters50/4254299
tttttctttctt

SEQ ID NO: 185370 - DNA, 12 bp, Unknown
  misc_feature (1)..( 12): Result.005 file - promoters50/4254299
atttttacattg

SEQ ID NO: 185371 - DNA, 12 bp, Unknown
  misc_feature (1)..( 12): Result.005 file - promoters50/4254299
cttttctcgagg

SEQ ID NO: 185372 - DNA, 10 bp, Unknown
  misc_feature (1)..( 10): Result.005 file - promoters50/4254299
ttaatttgaa

SEQ ID NO: 185373 - DNA, 10 bp, Unknown
  misc_feature (1)..( 10): Result.005 file - promoters50/4254299
ctaatttaac

SEQ ID NO: 185374 - DNA, 10 bp, Unknown
  misc_feature (1)..( 10): Result.005 file - promoters50/4254299
ttaatttttc

SEQ ID NO: 185375 - DNA, 10 bp, Unknown
  misc_feature (1)..( 10): Result.005 file - promoters50/4254299
ttaacttaac

SEQ ID NO: 185376 - DNA, 12 bp, Unknown
  misc_feature (1)..( 12): Result.005 file - promoters50/4254299
ttcatttgattt

SEQ ID NO: 185377 - DNA, 12 bp, Unknown
  misc_feature (1)..( 12): Result.005 file - promoters50/4254299
ataatttaattt

SEQ ID NO: 185378 - DNA, 12 bp, Unknown
  misc_feature (1)..( 12): Result.005 file - promoters50/4254299
gttatttaaacc

SEQ ID NO: 185379 - DNA, 12 bp, Unknown
  misc_feature (1)..( 12): Result.005 file - promoters50/4254299
ataaattaatac

SEQ ID NO: 185380 - DNA, 13 bp, Unknown
  misc_feature (1)..( 13): Result.005 file - promoters50/4254299
aaaaagttaactt

SEQ ID NO: 185381 - DNA, 13 bp, Unknown
  misc_feature (1)..( 13): Result.005 file - promoters50/4254299
aaaaatttattaa

SEQ ID NO: 185382 - DNA, 13 bp, Unknown
  misc_feature (1)..( 13): Result.005 file - promoters50/4254299
cctaatttaacct

SEQ ID NO: 185383 - DNA, 13 bp, Unknown
  misc_feature (1)..( 13): Result.005 file - promoters50/4254299
ctctattcaacct

SEQ ID NO: 185384 - DNA, 10 bp, Unknown
  misc_feature (1)..( 10): Result.005 file - promoters50/4254307
cgattttttg

SEQ ID NO: 185385 - DNA, 10 bp, Unknown
  misc_feature (1)..( 10): Result.005 file - promoters50/4254307
aagtttgttg

SEQ ID NO: 185386 - DNA, 10 bp, Unknown
  misc_feature (1)..( 10): Result.005 file - promoters50/4254307
tgattctttg

SEQ ID NO: 185387 - DNA, 10 bp, Unknown
  misc_feature (1)..( 10): Result.005 file - promoters50/4254307
tgactctctt

SEQ ID NO: 185388 - DNA, 10 bp, Unknown
  misc_feature (1)..( 10): Result.005 file - promoters50/4254307
tgattctttg

SEQ ID NO: 185389 - DNA, 10 bp, Unknown
  misc_feature (1)..( 10): Result.005 file - promoters50/4254307
tgactcatca

SEQ ID NO: 185390 - DNA, 14 bp, Unknown
  misc_feature (1)..( 14): Result.005 file - promoters50/4254307
ttaatttttttatt

SEQ ID NO: 185391 - DNA, 14 bp, Unknown
  misc_feature (1)..( 14): Result.005 file - promoters50/4254307
atgattctttgacc

SEQ ID NO: 185392 - DNA, 14 bp, Unknown
  misc_feature (1)..( 14): Result.005 file - promoters50/4254307
aatatttttaatat

SEQ ID NO: 185393 - DNA, 14 bp, Unknown
  misc_feature (1)..( 14): Result.005 file - promoters50/4254307
ttggttttgatagt

SEQ ID NO: 185394 - DNA, 14 bp, Unknown
  misc_feature (1)..( 14): Result.005 file - promoters50/4254307
tcagacttgactct

SEQ ID NO: 185395 - DNA, 14 bp, Unknown
  misc_feature (1)..( 14): Result.005 file - promoters50/4254307
aatactttatttta

SEQ ID NO: 185396 - DNA, 9 bp, Unknown
  misc_feature (1)..( 9): Result.005 file - promoters50/4254426
aacttctaa

SEQ ID NO: 185397 - DNA, 9 bp, Unknown
  misc_feature (1)..( 9): Result.005 file - promoters50/4254426
tccttataa

SEQ ID NO: 185398 - DNA, 9 bp, Unknown
  misc_feature (1)..( 9): Result.005 file - promoters50/4254426
ttcttctat

SEQ ID NO: 185399 - DNA, 9 bp, Unknown
  misc_feature (1)..( 9): Result.005 file - promoters50/4254426
tccctatct

SEQ ID NO: 185400 - DNA, 12 bp, Unknown
  misc_feature (1)..( 12): Result.005 file - promoters50/4254505
ctcttctacact

SEQ ID NO: 185401 - DNA, 12 bp, Unknown
  misc_feature (1)..( 12): Result.005 file - promoters50/4254505
tcactctaaact

SEQ ID NO: 185402 - DNA, 12 bp, Unknown
  misc_feature (1)..( 12): Result.005 file - promoters50/4254505
tcactataataa

SEQ ID NO: 185403 - DNA, 7 bp, Unknown
  misc_feature (1)..( 7): Result.005 file - promoters50/4254505
acagttt

SEQ ID NO: 185404 - DNA, 7 bp, Unknown
  misc_feature (1)..( 7): Result.005 file - promoters50/4254505
gcagttt

SEQ ID NO: 185405 - DNA, 7 bp, Unknown
  misc_feature (1)..( 7): Result.005 file - promoters50/4254505
acaattt

SEQ ID NO: 185406 - DNA, 10 bp, Unknown
  misc_feature (1)..( 10): Result.005 file - promoters50/4254505
atcaaaaaat

SEQ ID NO: 185407 - DNA, 10 bp, Unknown
  misc_feature (1)..( 10): Result.005 file - promoters50/4254505
cacaataaat

SEQ ID NO: 185408 - DNA, 10 bp, Unknown
  misc_feature (1)..( 10): Result.005 file - promoters50/4254505
tataaaaaaa

SEQ ID NO: 185409 - DNA, 8 bp, Unknown
  misc_feature (1)..( 8): Result.005 file - promoters50/4254505
agtatttt

SEQ ID NO: 185410 - DNA, 8 bp, Unknown
  misc_feature (1)..( 8): Result.005 file - promoters50/4254505
agtgtttc

SEQ ID NO: 185411 - DNA, 8 bp, Unknown
  misc_feature (1)..( 8): Result.005 file - promoters50/4254505
cttgtttc

SEQ ID NO: 185412 - DNA, 8 bp, Unknown
  misc_feature (1)..( 8): Result.005 file - promoters50/4254505
aaagtata

SEQ ID NO: 185413 - DNA, 8 bp, Unknown
  misc_feature (1)..( 8): Result.005 file - promoters50/4254505
aaaatatt

SEQ ID NO: 185414 - DNA, 8 bp, Unknown
  misc_feature (1)..( 8): Result.005 file - promoters50/4254505
ataatatt

SEQ ID NO: 185415 - DNA, 13 bp, Unknown
  misc_feature (1)..( 13): Result.005 file - promoters50/4254505
gaatatatgtgtt

SEQ ID NO: 185416 - DNA, 13 bp, Unknown
  misc_feature (1)..( 13): Result.005 file - promoters50/4254505
taatttataattc

SEQ ID NO: 185417 - DNA, 13 bp, Unknown
  misc_feature (1)..( 13): Result.005 file - promoters50/4254505
aaatttgttattt

SEQ ID NO: 185418 - DNA, 9 bp, Unknown
  misc_feature (1)..( 9): Result.005 file - promoters50/4262398
ccattctcg

SEQ ID NO: 185419 - DNA, 9 bp, Unknown
  misc_feature (1)..( 9): Result.005 file - promoters50/4262398
cttttctcg

SEQ ID NO: 185420 - DNA, 9 bp, Unknown
  misc_feature (1)..( 9): Result.005 file - promoters50/4262398
cttgtctcc

SEQ ID NO: 185421 - DNA, 11 bp, Unknown
  misc_feature (1)..( 11): Result.005 file - promoters50/4262420
aaaaagaaaaa

SEQ ID NO: 185422 - DNA, 11 bp, Unknown
  misc_feature (1)..( 11): Result.005 file - promoters50/4262420
aaaaagaaaag

SEQ ID NO: 185423 - DNA, 11 bp, Unknown
  misc_feature (1)..( 11): Result.005 file - promoters50/4262420
gataagtaaag

SEQ ID NO: 185424 - DNA, 11 bp, Unknown
  misc_feature (1)..( 11): Result.005 file - promoters50/4262420
acaaacaaaaa

SEQ ID NO: 185425 - DNA, 11 bp, Unknown
  misc_feature (1)..( 11): Result.005 file - promoters50/4262420
gtatacaaaca

SEQ ID NO: 185426 - DNA, 11 bp, Unknown
  misc_feature (1)..( 11): Result.005 file - promoters50/4262420
agaaccaaaat

SEQ ID NO: 185427 - DNA, 11 bp, Unknown
  misc_feature (1)..( 11): Result.005 file - promoters50/4262420
accgaaaaaac

SEQ ID NO: 185428 - DNA, 11 bp, Unknown
  misc_feature (1)..( 11): Result.005 file - promoters50/4262420
ttagaaaaatg

SEQ ID NO: 185429 - DNA, 12 bp, Unknown
  misc_feature (1)..( 12): Result.005 file - promoters50/4262420
tgagaacaaagc

SEQ ID NO: 185430 - DNA, 12 bp, Unknown
  misc_feature (1)..( 12): Result.005 file - promoters50/4262420
aaagaacaaggt

SEQ ID NO: 185431 - DNA, 12 bp, Unknown
  misc_feature (1)..( 12): Result.005 file - promoters50/4262420
accgaaaaaaca

SEQ ID NO: 185432 - DNA, 12 bp, Unknown
  misc_feature (1)..( 12): Result.005 file - promoters50/4262420
ggagaacattgt

SEQ ID NO: 185433 - DNA, 14 bp, Unknown
  misc_feature (1)..( 14): Result.005 file - promoters50/4262420
aattttgattcagg

SEQ ID NO: 185434 - DNA, 14 bp, Unknown
  misc_feature (1)..( 14): Result.005 file - promoters50/4262420
gattttgatttttg

SEQ ID NO: 185435 - DNA, 14 bp, Unknown
  misc_feature (1)..( 14): Result.005 file - promoters50/4262420
gtttttgaatcgat

SEQ ID NO: 185436 - DNA, 14 bp, Unknown
  misc_feature (1)..( 14): Result.005 file - promoters50/4262420
aatgttgcaaacga

SEQ ID NO: 185437 - DNA, 14 bp, Unknown
  misc_feature (1)..( 14): Result.005 file - promoters50/4262420
aagtttcaatcttc

SEQ ID NO: 185438 - DNA, 14 bp, Unknown
  misc_feature (1)..( 14): Result.005 file - promoters50/4262420
aaaactgattattg

SEQ ID NO: 185439 - DNA, 10 bp, Unknown
  misc_feature (1)..( 10): Result.005 file - promoters50/4262422
atgataagag

SEQ ID NO: 185440 - DNA, 10 bp, Unknown
  misc_feature (1)..( 10): Result.005 file - promoters50/4262422
gcgattagaa

SEQ ID NO: 185441 - DNA, 10 bp, Unknown
  misc_feature (1)..( 10): Result.005 file - promoters50/4262422
tggataagtt

SEQ ID NO: 185442 - DNA, 10 bp, Unknown
  misc_feature (1)..( 10): Result.005 file - promoters50/4262422
gtgataatga

SEQ ID NO: 185443 - DNA, 10 bp, Unknown
  misc_feature (1)..( 10): Result.005 file - promoters50/4262422
tggataaaac

SEQ ID NO: 185444 - DNA, 10 bp, Unknown
  misc_feature (1)..( 10): Result.005 file - promoters50/4262422
cagatgatga

SEQ ID NO: 185445 - DNA, 13 bp, Unknown
  misc_feature (1)..( 13): Result.005 file - promoters50/4262422
tggtttaatcatt

SEQ ID NO: 185446 - DNA, 13 bp, Unknown
  misc_feature (1)..( 13): Result.005 file - promoters50/4262422
taatttaatttgt

SEQ ID NO: 185447 - DNA, 13 bp, Unknown
  misc_feature (1)..( 13): Result.005 file - promoters50/4262422
taatttcatttga

SEQ ID NO: 185448 - DNA, 13 bp, Unknown
  misc_feature (1)..( 13): Result.005 file - promoters50/4262422
tgagttgattata

SEQ ID NO: 185449 - DNA, 13 bp, Unknown
  misc_feature (1)..( 13): Result.005 file - promoters50/4262422
acatttgagtcct

SEQ ID NO: 185450 - DNA, 13 bp, Unknown
  misc_feature (1)..( 13): Result.005 file - promoters50/4262422
gatgtgaattgtg

SEQ ID NO: 185451 - DNA, 13 bp, Unknown
  misc_feature (1)..( 13): Result.005 file - promoters50/4262422
gacagtgatttgt

SEQ ID NO: 185452 - DNA, 10 bp, Unknown
  misc_feature (1)..( 10): Result.005 file - promoters50/4262428
attatgttaa

SEQ ID NO: 185453 - DNA, 10 bp, Unknown
  misc_feature (1)..( 10): Result.005 file - promoters50/4262428
cttatgtctt

SEQ ID NO: 185454 - DNA, 10 bp, Unknown
  misc_feature (1)..( 10): Result.005 file - promoters50/4262428
gttaagtttt

SEQ ID NO: 185455 - DNA, 10 bp, Unknown
  misc_feature (1)..( 10): Result.005 file - promoters50/4262428
attatgtcat

SEQ ID NO: 185456 - DNA, 10 bp, Unknown
  misc_feature (1)..( 10): Result.005 file - promoters50/4262428
aagaagtttg

SEQ ID NO: 185457 - DNA, 10 bp, Unknown
  misc_feature (1)..( 10): Result.005 file - promoters50/4262428
attttgtcat

SEQ ID NO: 185458 - DNA, 12 bp, Unknown
  misc_feature (1)..( 12): Result.005 file - promoters50/4262428
tgtcataaatag

SEQ ID NO: 185459 - DNA, 12 bp, Unknown
  misc_feature (1)..( 12): Result.005 file - promoters50/4262428
caatataaatgt

SEQ ID NO: 185460 - DNA, 12 bp, Unknown
  misc_feature (1)..( 12): Result.005 file - promoters50/4262428
tgtaataaacga

SEQ ID NO: 185461 - DNA, 12 bp, Unknown
  misc_feature (1)..( 12): Result.005 file - promoters50/4262428
taaaataaaaat

SEQ ID NO: 185462 - DNA, 12 bp, Unknown
  misc_feature (1)..( 12): Result.005 file - promoters50/4262428
aaatttaaattt

SEQ ID NO: 185463 - DNA, 12 bp, Unknown
  misc_feature (1)..( 12): Result.005 file - promoters50/4262428
caccaaaaatac

SEQ ID NO: 185464 - DNA, 11 bp, Unknown
  misc_feature (1)..( 11): Result.005 file - promoters50/4262428
atgttaacgac

SEQ ID NO: 185465 - DNA, 11 bp, Unknown
  misc_feature (1)..( 11): Result.005 file - promoters50/4262428
atgttaaataa

SEQ ID NO: 185466 - DNA, 11 bp, Unknown
  misc_feature (1)..( 11): Result.005 file - promoters50/4262428
ttgttaacagg

SEQ ID NO: 185467 - DNA, 11 bp, Unknown
  misc_feature (1)..( 11): Result.005 file - promoters50/4262428
gtgtaaaatgg

SEQ ID NO: 185468 - DNA, 11 bp, Unknown
  misc_feature (1)..( 11): Result.005 file - promoters50/4262428
aagttatataa

SEQ ID NO: 185469 - DNA, 11 bp, Unknown
  misc_feature (1)..( 11): Result.005 file - promoters50/4262428
gtgtaagagga

SEQ ID NO: 185470 - DNA, 13 bp, Unknown
  misc_feature (1)..( 13): Result.005 file - promoters50/4262446
ctactaaaaaaat

SEQ ID NO: 185471 - DNA, 13 bp, Unknown
  misc_feature (1)..( 13): Result.005 file - promoters50/4262446
acctcaaacaaat

SEQ ID NO: 185472 - DNA, 13 bp, Unknown
  misc_feature (1)..( 13): Result.005 file - promoters50/4262446
ctaccaaaaatga

SEQ ID NO: 185473 - DNA, 13 bp, Unknown
  misc_feature (1)..( 13): Result.005 file - promoters50/4262446
cacacaaaaaact

SEQ ID NO: 185474 - DNA, 13 bp, Unknown
  misc_feature (1)..( 13): Result.005 file - promoters50/4262446
tgaataaaaaaac

SEQ ID NO: 185475 - DNA, 13 bp, Unknown
  misc_feature (1)..( 13): Result.005 file - promoters50/4262446
gttagaaataaaa

SEQ ID NO: 185476 - DNA, 13 bp, Unknown
  misc_feature (1)..( 13): Result.005 file - promoters50/4262446
tctagataaaagt

SEQ ID NO: 185477 - DNA, 11 bp, Unknown
  misc_feature (1)..( 11): Result.005 file - promoters50/4262446
ccaataataat

SEQ ID NO: 185478 - DNA, 11 bp, Unknown
  misc_feature (1)..( 11): Result.005 file - promoters50/4262446
aaaataatgaa

SEQ ID NO: 185479 - DNA, 11 bp, Unknown
  misc_feature (1)..( 11): Result.005 file - promoters50/4262446
tcaaaaattaa

SEQ ID NO: 185480 - DNA, 11 bp, Unknown
  misc_feature (1)..( 11): Result.005 file - promoters50/4262446
taaataattgg

SEQ ID NO: 185481 - DNA, 11 bp, Unknown
  misc_feature (1)..( 11): Result.005 file - promoters50/4262446
tcttaaattta

SEQ ID NO: 185482 - DNA, 11 bp, Unknown
  misc_feature (1)..( 11): Result.005 file - promoters50/4262446
cttatattatg

SEQ ID NO: 185483 - DNA, 14 bp, Unknown
  misc_feature (1)..( 14): Result.005 file - promoters50/4262446
caatatacatcata

SEQ ID NO: 185484 - DNA, 14 bp, Unknown
  misc_feature (1)..( 14): Result.005 file - promoters50/4262446
attttgacatcata

SEQ ID NO: 185485 - DNA, 14 bp, Unknown
  misc_feature (1)..( 14): Result.005 file - promoters50/4262446
tccaaccaatcata

SEQ ID NO: 185486 - DNA, 14 bp, Unknown
  misc_feature (1)..( 14): Result.005 file - promoters50/4262446
attttgaaatcatg

SEQ ID NO: 185487 - DNA, 14 bp, Unknown
  misc_feature (1)..( 14): Result.005 file - promoters50/4262446
ctatcaaaataatg

SEQ ID NO: 185488 - DNA, 14 bp, Unknown
  misc_feature (1)..( 14): Result.005 file - promoters50/4262446
ctttgcaaatttta

SEQ ID NO: 185489 - DNA, 15 bp, Unknown
  misc_feature (1)..( 15): Result.005 file - promoters50/4262446
ttattctgataaatc

SEQ ID NO: 185490 - DNA, 15 bp, Unknown
  misc_feature (1)..( 15): Result.005 file - promoters50/4262446
tcattttgacatcat

SEQ ID NO: 185491 - DNA, 15 bp, Unknown
  misc_feature (1)..( 15): Result.005 file - promoters50/4262446
aaattttgaaatcat

SEQ ID NO: 185492 - DNA, 15 bp, Unknown
  misc_feature (1)..( 15): Result.005 file - promoters50/4262446
aaataatgaatttat

SEQ ID NO: 185493 - DNA, 15 bp, Unknown
  misc_feature (1)..( 15): Result.005 file - promoters50/4262446
aaattttattgcttg

SEQ ID NO: 185494 - DNA, 15 bp, Unknown
  misc_feature (1)..( 15): Result.005 file - promoters50/4262446
acttttttaaagttc

SEQ ID NO: 185495 - DNA, 15 bp, Unknown
  misc_feature (1)..( 15): Result.005 file - promoters50/4262446
aaagttttaagataa

SEQ ID NO: 185496 - DNA, 11 bp, Unknown
  misc_feature (1)..( 11): Result.005 file - promoters50/4262480
ctgtttggact

SEQ ID NO: 185497 - DNA, 11 bp, Unknown
  misc_feature (1)..( 11): Result.005 file - promoters50/4262480
atggttgaact

SEQ ID NO: 185498 - DNA, 11 bp, Unknown
  misc_feature (1)..( 11): Result.005 file - promoters50/4262480
atggctgaatc

SEQ ID NO: 185499 - DNA, 9 bp, Unknown
  misc_feature (1)..( 9): Result.005 file - promoters50/4262480
gctgctgaa

SEQ ID NO: 185500 - DNA, 9 bp, Unknown
  misc_feature (1)..( 9): Result.005 file - promoters50/4262480
atggctgaa

SEQ ID NO: 185501 - DNA, 9 bp, Unknown
  misc_feature (1)..( 9): Result.005 file - promoters50/4262480
atggttgaa

SEQ ID NO: 185502 - DNA, 13 bp, Unknown
  misc_feature (1)..( 13): Result.005 file - promoters50/4262496
actaattatagtt

SEQ ID NO: 185503 - DNA, 13 bp, Unknown
  misc_feature (1)..( 13): Result.005 file - promoters50/4262496
tctatttaaagtt

SEQ ID NO: 185504 - DNA, 13 bp, Unknown
  misc_feature (1)..( 13): Result.005 file - promoters50/4262496
actaatttaacaa

SEQ ID NO: 185505 - DNA, 13 bp, Unknown
  misc_feature (1)..( 13): Result.005 file - promoters50/4262496
cctaatttactac

SEQ ID NO: 185506 - DNA, 8 bp, Unknown
  misc_feature (1)..( 8): Result.005 file - promoters50/4262503
aacacaaa

SEQ ID NO: 185507 - DNA, 8 bp, Unknown
  misc_feature (1)..( 8): Result.005 file - promoters50/4262503
aactcaag

SEQ ID NO: 185508 - DNA, 8 bp, Unknown
  misc_feature (1)..( 8): Result.005 file - promoters50/4262503
gacagaaa

SEQ ID NO: 185509 - DNA, 9 bp, Unknown
  misc_feature (1)..( 9): Result.005 file - promoters50/4262503
acattttgt

SEQ ID NO: 185510 - DNA, 9 bp, Unknown
  misc_feature (1)..( 9): Result.005 file - promoters50/4262503
acatttgtt

SEQ ID NO: 185511 - DNA, 9 bp, Unknown
  misc_feature (1)..( 9): Result.005 file - promoters50/4262503
ccattcgtt

SEQ ID NO: 185512 - DNA, 15 bp, Unknown
  misc_feature (1)..( 15): Result.005 file - promoters50/4262562
gagttttgacttttc

SEQ ID NO: 185513 - DNA, 15 bp, Unknown
  misc_feature (1)..( 15): Result.005 file - promoters50/4262562
ataatttaacttttt

SEQ ID NO: 185514 - DNA, 15 bp, Unknown
  misc_feature (1)..( 15): Result.005 file - promoters50/4262562
ctaattaaacttggt

SEQ ID NO: 185515 - DNA, 15 bp, Unknown
  misc_feature (1)..( 15): Result.005 file - promoters50/4262562
ctaattagattatta

SEQ ID NO: 185516 - DNA, 15 bp, Unknown
  misc_feature (1)..( 15): Result.005 file - promoters50/4262562
gggttggaacctggc

SEQ ID NO: 185517 - DNA, 15 bp, Unknown
  misc_feature (1)..( 15): Result.005 file - promoters50/4262562
tggatatttcttttt

SEQ ID NO: 185518 - DNA, 9 bp, Unknown
  misc_feature (1)..( 9): Result.005 file - promoters50/4265060
agaagttaa

SEQ ID NO: 185519 - DNA, 9 bp, Unknown
  misc_feature (1)..( 9): Result.005 file - promoters50/4265060
agaagttga

SEQ ID NO: 185520 - DNA, 9 bp, Unknown
  misc_feature (1)..( 9): Result.005 file - promoters50/4265060
gtaagataa

SEQ ID NO: 185521 - DNA, 9 bp, Unknown
  misc_feature (1)..( 9): Result.005 file - promoters50/4265060
caaagatat

SEQ ID NO: 185522 - DNA, 8 bp, Unknown
  misc_feature (1)..( 8): Result.005 file - promoters50/4265060
aatctctc

SEQ ID NO: 185523 - DNA, 8 bp, Unknown
  misc_feature (1)..( 8): Result.005 file - promoters50/4265060
gttctctc

SEQ ID NO: 185524 - DNA, 8 bp, Unknown
  misc_feature (1)..( 8): Result.005 file - promoters50/4265060
aatttctt

SEQ ID NO: 185525 - DNA, 7 bp, Unknown
  misc_feature (1)..( 7): Result.005 file - promoters50/4265060
agaaatg

SEQ ID NO: 185526 - DNA, 7 bp, Unknown
  misc_feature (1)..( 7): Result.005 file - promoters50/4265060
agagatg

SEQ ID NO: 185527 - DNA, 7 bp, Unknown
  misc_feature (1)..( 7): Result.005 file - promoters50/4265060
agaaaga

SEQ ID NO: 185528 - DNA, 9 bp, Unknown
  misc_feature (1)..( 9): Result.005 file - promoters50/4265060
taaacagta

SEQ ID NO: 185529 - DNA, 9 bp, Unknown
  misc_feature (1)..( 9): Result.005 file - promoters50/4265060
taaacatat

SEQ ID NO: 185530 - DNA, 9 bp, Unknown
  misc_feature (1)..( 9): Result.005 file - promoters50/4265060
caaagatat

SEQ ID NO: 185531 - DNA, 9 bp, Unknown
  misc_feature (1)..( 9): Result.005 file - promoters50/4265060
tcagagaaa

SEQ ID NO: 185532 - DNA, 9 bp, Unknown
  misc_feature (1)..( 9): Result.005 file - promoters50/4265060
tttgagaaa

SEQ ID NO: 185533 - DNA, 9 bp, Unknown
  misc_feature (1)..( 9): Result.005 file - promoters50/4265060
tcagagaaa

SEQ ID NO: 185534 - DNA, 8 bp, Unknown
  misc_feature (1)..( 8): Result.005 file - promoters50/4265699
ttaagcaa

SEQ ID NO: 185535 - DNA, 8 bp, Unknown
  misc_feature (1)..( 8): Result.005 file - promoters50/4265699
ttaatcaa

SEQ ID NO: 185536 - DNA, 8 bp, Unknown
  misc_feature (1)..( 8): Result.005 file - promoters50/4265699
caaatcaa

SEQ ID NO: 185537 - DNA, 8 bp, Unknown
  misc_feature (1)..( 8): Result.005 file - promoters50/4265699
taaaacaa

SEQ ID NO: 185538 - DNA, 8 bp, Unknown
  misc_feature (1)..( 8): Result.005 file - promoters50/4265699
aaagaaaa

SEQ ID NO: 185539 - DNA, 8 bp, Unknown
  misc_feature (1)..( 8): Result.005 file - promoters50/4265699
aaataaat

SEQ ID NO: 185540 - DNA, 8 bp, Unknown
  misc_feature (1)..( 8): Result.005 file - promoters50/4265699
aaagaaaa

SEQ ID NO: 185541 - DNA, 8 bp, Unknown
  misc_feature (1)..( 8): Result.005 file - promoters50/4265699
atataaat

SEQ ID NO: 185542 - DNA, 8 bp, Unknown
  misc_feature (1)..( 8): Result.005 file - promoters50/4266227
ttggaaga

SEQ ID NO: 185543 - DNA, 8 bp, Unknown
  misc_feature (1)..( 8): Result.005 file - promoters50/4266227
ttggaact

SEQ ID NO: 185544 - DNA, 8 bp, Unknown
  misc_feature (1)..( 8): Result.005 file - promoters50/4266227
ttgggaga

SEQ ID NO: 185545 - DNA, 10 bp, Unknown
  misc_feature (1)..( 10): Result.005 file - promoters50/4266608
aagtaaacgc

SEQ ID NO: 185546 - DNA, 10 bp, Unknown
  misc_feature (1)..( 10): Result.005 file - promoters50/4266608
aagaaaaagg

SEQ ID NO: 185547 - DNA, 10 bp, Unknown
  misc_feature (1)..( 10): Result.005 file - promoters50/4266608
gagtcaacat

SEQ ID NO: 185548 - DNA, 10 bp, Unknown
  misc_feature (1)..( 10): Result.005 file - promoters50/4266608
aagtaaaagt

SEQ ID NO: 185549 - DNA, 10 bp, Unknown
  misc_feature (1)..( 10): Result.005 file - promoters50/4266608
agttcaacac

SEQ ID NO: 185550 - DNA, 10 bp, Unknown
  misc_feature (1)..( 10): Result.005 file - promoters50/4266608
tatgcaacac

SEQ ID NO: 185551 - DNA, 11 bp, Unknown
  misc_feature (1)..( 11): Result.005 file - promoters50/4266608
agataaaaata

SEQ ID NO: 185552 - DNA, 11 bp, Unknown
  misc_feature (1)..( 11): Result.005 file - promoters50/4266608
atctaaaaata

SEQ ID NO: 185553 - DNA, 11 bp, Unknown
  misc_feature (1)..( 11): Result.005 file - promoters50/4266608
acttaaaaaca

SEQ ID NO: 185554 - DNA, 11 bp, Unknown
  misc_feature (1)..( 11): Result.005 file - promoters50/4266608
gattaaaaatc

SEQ ID NO: 185555 - DNA, 11 bp, Unknown
  misc_feature (1)..( 11): Result.005 file - promoters50/4266608
ctctagaaaca

SEQ ID NO: 185556 - DNA, 11 bp, Unknown
  misc_feature (1)..( 11): Result.005 file - promoters50/4266608
agatacaaatg

SEQ ID NO: 185557 - DNA, 15 bp, Unknown
  misc_feature (1)..( 15): Result.005 file - promoters50/4267125
gttttatttgtgtga

SEQ ID NO: 185558 - DNA, 15 bp, Unknown
  misc_feature (1)..( 15): Result.005 file - promoters50/4267125
tacttacttgacgcc

SEQ ID NO: 185559 - DNA, 15 bp, Unknown
  misc_feature (1)..( 15): Result.005 file - promoters50/4267125
gttttgtttgtggag

SEQ ID NO: 185560 - DNA, 15 bp, Unknown
  misc_feature (1)..( 15): Result.005 file - promoters50/4267125
gtacgatttgttagg

SEQ ID NO: 185561 - DNA, 15 bp, Unknown
  misc_feature (1)..( 15): Result.005 file - promoters50/4267125
taattatatgtatat

SEQ ID NO: 185562 - DNA, 15 bp, Unknown
  misc_feature (1)..( 15): Result.005 file - promoters50/4267125
cttttgtttttggta

SEQ ID NO: 185563 - DNA, 15 bp, Unknown
  misc_feature (1)..( 15): Result.005 file - promoters50/4267125
ttggaatttggaaaa

SEQ ID NO: 185564 - DNA, 12 bp, Unknown
  misc_feature (1)..( 12): Result.005 file - promoters50/4267125
attgagcatagg

SEQ ID NO: 185565 - DNA, 12 bp, Unknown
  misc_feature (1)..( 12): Result.005 file - promoters50/4267125
attgaccatctt

SEQ ID NO: 185566 - DNA, 12 bp, Unknown
  misc_feature (1)..( 12): Result.005 file - promoters50/4267125
aatgaacatcaa

SEQ ID NO: 185567 - DNA, 12 bp, Unknown
  misc_feature (1)..( 12): Result.005 file - promoters50/4267125
taagaacattgg

SEQ ID NO: 185568 - DNA, 12 bp, Unknown
  misc_feature (1)..( 12): Result.005 file - promoters50/4267125
aaagaccatctt

SEQ ID NO: 185569 - DNA, 12 bp, Unknown
  misc_feature (1)..( 12): Result.005 file - promoters50/4267125
tgagatcataat

SEQ ID NO: 185570 - DNA, 19 bp, Unknown
  misc_feature (1)..( 19): Result.005 file - promoters50/4267125
ttgtataatatttgttttc

SEQ ID NO: 185571 - DNA, 19 bp, Unknown
  misc_feature (1)..( 19): Result.005 file - promoters50/4267125
ttagccacattttgttttt

SEQ ID NO: 185572 - DNA, 19 bp, Unknown
  misc_feature (1)..( 19): Result.005 file - promoters50/4267125
ttaaccacattttgtcgaa

SEQ ID NO: 185573 - DNA, 19 bp, Unknown
  misc_feature (1)..( 19): Result.005 file - promoters50/4267125
tcattaacgtttggttttg

SEQ ID NO: 185574 - DNA, 19 bp, Unknown
  misc_feature (1)..( 19): Result.005 file - promoters50/4267125
cccaccggcgttggatttg

SEQ ID NO: 185575 - DNA, 19 bp, Unknown
  misc_feature (1)..( 19): Result.005 file - promoters50/4267125
aaagctttaattagctcac

SEQ ID NO: 185576 - DNA, 10 bp, Unknown
  misc_feature (1)..( 10): Result.005 file - promoters50/4267125
cattttgttt

SEQ ID NO: 185577 - DNA, 10 bp, Unknown
  misc_feature (1)..( 10): Result.005 file - promoters50/4267125
ctttttgttt

SEQ ID NO: 185578 - DNA, 10 bp, Unknown
  misc_feature (1)..( 10): Result.005 file - promoters50/4267125
gtttttgtcc

SEQ ID NO: 185579 - DNA, 10 bp, Unknown
  misc_feature (1)..( 10): Result.005 file - promoters50/4267125
gttttttctc

SEQ ID NO: 185580 - DNA, 10 bp, Unknown
  misc_feature (1)..( 10): Result.005 file - promoters50/4267125
tgtttagtct

SEQ ID NO: 185581 - DNA, 10 bp, Unknown
  misc_feature (1)..( 10): Result.005 file - promoters50/4267125
ctttttgatg

SEQ ID NO: 185582 - DNA, 8 bp, Unknown
  misc_feature (1)..( 8): Result.005 file - promoters50/4268705
ttgaattt

SEQ ID NO: 185583 - DNA, 8 bp, Unknown
  misc_feature (1)..( 8): Result.005 file - promoters50/4268705
ttgaattc

SEQ ID NO: 185584 - DNA, 8 bp, Unknown
  misc_feature (1)..( 8): Result.005 file - promoters50/4268705
atgagttt

SEQ ID NO: 185585 - DNA, 12 bp, Unknown
  misc_feature (1)..( 12): Result.005 file - promoters50/4268705
ataaatgggcct

SEQ ID NO: 185586 - DNA, 12 bp, Unknown
  misc_feature (1)..( 12): Result.005 file - promoters50/4268705
ataaatgggcta

SEQ ID NO: 185587 - DNA, 12 bp, Unknown
  misc_feature (1)..( 12): Result.005 file - promoters50/4268705
aaatctggtcta

SEQ ID NO: 185588 - DNA, 8 bp, Unknown
  misc_feature (1)..( 8): Result.005 file - promoters50/4270131
ttaataac

SEQ ID NO: 185589 - DNA, 8 bp, Unknown
  misc_feature (1)..( 8): Result.005 file - promoters50/4270131
ataataat

SEQ ID NO: 185590 - DNA, 8 bp, Unknown
  misc_feature (1)..( 8): Result.005 file - promoters50/4270131
ttaataac

SEQ ID NO: 185591 - DNA, 11 bp, Unknown
  misc_feature (1)..( 11): Result.005 file - promoters50/4270131
tttgtttcttt

SEQ ID NO: 185592 - DNA, 11 bp, Unknown
  misc_feature (1)..( 11): Result.005 file - promoters50/4270131
cctgtttcgcg

SEQ ID NO: 185593 - DNA, 11 bp, Unknown
  misc_feature (1)..( 11): Result.005 file - promoters50/4270131
tttttttcttt

SEQ ID NO: 185594 - DNA, 8 bp, Unknown
  misc_feature (1)..( 8): Result.005 file - promoters50/4281568
taaacaag

SEQ ID NO: 185595 - DNA, 8 bp, Unknown
  misc_feature (1)..( 8): Result.005 file - promoters50/4281568
taaaaaag

SEQ ID NO: 185596 - DNA, 8 bp, Unknown
  misc_feature (1)..( 8): Result.005 file - promoters50/4281568
gaaaaaaa

SEQ ID NO: 185597 - DNA, 10 bp, Unknown
  misc_feature (1)..( 10): Result.005 file - promoters50/4281576
taataaaata

SEQ ID NO: 185598 - DNA, 10 bp, Unknown
  misc_feature (1)..( 10): Result.005 file - promoters50/4281576
taacaaaact

SEQ ID NO: 185599 - DNA, 10 bp, Unknown
  misc_feature (1)..( 10): Result.005 file - promoters50/4281576
tcataaaaaa

SEQ ID NO: 185600 - DNA, 10 bp, Unknown
  misc_feature (1)..( 10): Result.005 file - promoters50/4281576
cttcaaaacc

SEQ ID NO: 185601 - DNA, 11 bp, Unknown
  misc_feature (1)..( 11): Result.005 file - promoters50/4281576
atcagaaaacc

SEQ ID NO: 185602 - DNA, 11 bp, Unknown
  misc_feature (1)..( 11): Result.005 file - promoters50/4281576
caatagaaatg

SEQ ID NO: 185603 - DNA, 8 bp, Unknown
  misc_feature (1)..( 8): Result.005 file - promoters50/4281645
aatgtgat

SEQ ID NO: 185604 - DNA, 8 bp, Unknown
  misc_feature (1)..( 8): Result.005 file - promoters50/4281645
aatatgat

SEQ ID NO: 185605 - DNA, 8 bp, Unknown
  misc_feature (1)..( 8): Result.005 file - promoters50/4281645
aatatgcc

SEQ ID NO: 185606 - DNA, 8 bp, Unknown
  misc_feature (1)..( 8): Result.005 file - promoters50/4281659
cttcatta

SEQ ID NO: 185607 - DNA, 8 bp, Unknown
  misc_feature (1)..( 8): Result.005 file - promoters50/4281659
tttcttta

SEQ ID NO: 185608 - DNA, 8 bp, Unknown
  misc_feature (1)..( 8): Result.005 file - promoters50/4281659
cttaattt

SEQ ID NO: 185609 - DNA, 8 bp, Unknown
  misc_feature (1)..( 8): Result.005 file - promoters50/4281659
aaatttgt

SEQ ID NO: 185610 - DNA, 8 bp, Unknown
  misc_feature (1)..( 8): Result.005 file - promoters50/4281659
aaatatgt

SEQ ID NO: 185611 - DNA, 8 bp, Unknown
  misc_feature (1)..( 8): Result.005 file - promoters50/4281659
caatatgc

SEQ ID NO: 185612 - DNA, 8 bp, Unknown
  misc_feature (1)..( 8): Result.005 file - promoters50/4281676
attttttg

SEQ ID NO: 185613 - DNA, 8 bp, Unknown
  misc_feature (1)..( 8): Result.005 file - promoters50/4281676
attgtttg

SEQ ID NO: 185614 - DNA, 8 bp, Unknown
  misc_feature (1)..( 8): Result.005 file - promoters50/4281676
attctttc

SEQ ID NO: 185615 - DNA, 13 bp, Unknown
  misc_feature (1)..( 13): Result.005 file - promoters50/4281690
aacaaacaaacaa

SEQ ID NO: 185616 - DNA, 13 bp, Unknown
  misc_feature (1)..( 13): Result.005 file - promoters50/4281690
ctcaatcaaactc

SEQ ID NO: 185617 - DNA, 13 bp, Unknown
  misc_feature (1)..( 13): Result.005 file - promoters50/4281690
aacaaaaaaaata

SEQ ID NO: 185618 - DNA, 13 bp, Unknown
  misc_feature (1)..( 13): Result.005 file - promoters50/4281690
accaatcacaaca

SEQ ID NO: 185619 - DNA, 13 bp, Unknown
  misc_feature (1)..( 13): Result.005 file - promoters50/4281690
caaaatcaaattt

SEQ ID NO: 185620 - DNA, 13 bp, Unknown
  misc_feature (1)..( 13): Result.005 file - promoters50/4281690
aagtgtcaatttt

SEQ ID NO: 185621 - DNA, 14 bp, Unknown
  misc_feature (1)..( 14): Result.005 file - promoters50/4281690
caaacaaacaactc

SEQ ID NO: 185622 - DNA, 14 bp, Unknown
  misc_feature (1)..( 14): Result.005 file - promoters50/4281690
ttttaatacatctc

SEQ ID NO: 185623 - DNA, 14 bp, Unknown
  misc_feature (1)..( 14): Result.005 file - promoters50/4281690
gtaataaaaaactc

SEQ ID NO: 185624 - DNA, 14 bp, Unknown
  misc_feature (1)..( 14): Result.005 file - promoters50/4281690
atccacgacatctg

SEQ ID NO: 185625 - DNA, 14 bp, Unknown
  misc_feature (1)..( 14): Result.005 file - promoters50/4281690
gtaagaaaaaagtg

SEQ ID NO: 185626 - DNA, 14 bp, Unknown
  misc_feature (1)..( 14): Result.005 file - promoters50/4281690
ttaacaaaaaaaat

SEQ ID NO: 185627 - DNA, 14 bp, Unknown
  misc_feature (1)..( 14): Result.005 file - promoters50/4281690
aagacaaaaaacca

SEQ ID NO: 185628 - DNA, 12 bp, Unknown
  misc_feature (1)..( 12): Result.005 file - promoters50/4281690
atttttattcta

SEQ ID NO: 185629 - DNA, 12 bp, Unknown
  misc_feature (1)..( 12): Result.005 file - promoters50/4281690
tgtttgattgaa

SEQ ID NO: 185630 - DNA, 12 bp, Unknown
  misc_feature (1)..( 12): Result.005 file - promoters50/4281690
agatttatttcg

SEQ ID NO: 185631 - DNA, 12 bp, Unknown
  misc_feature (1)..( 12): Result.005 file - promoters50/4281690
caattaatctca

SEQ ID NO: 185632 - DNA, 12 bp, Unknown
  misc_feature (1)..( 12): Result.005 file - promoters50/4281690
atttttaccata

SEQ ID NO: 185633 - DNA, 12 bp, Unknown
  misc_feature (1)..( 12): Result.005 file - promoters50/4281690
acagaaatgtca

SEQ ID NO: 185634 - DNA, 8 bp, Unknown
  misc_feature (1)..( 8): Result.005 file - promoters50/4281690
aaaaaaga

SEQ ID NO: 185635 - DNA, 8 bp, Unknown
  misc_feature (1)..( 8): Result.005 file - promoters50/4281690
caaaaaga

SEQ ID NO: 185636 - DNA, 9 bp, Unknown
  misc_feature (1)..( 9): Result.005 file - promoters50/4281690
taataaatg

SEQ ID NO: 185637 - DNA, 9 bp, Unknown
  misc_feature (1)..( 9): Result.005 file - promoters50/4281690
taagaaatt

SEQ ID NO: 185638 - DNA, 9 bp, Unknown
  misc_feature (1)..( 9): Result.005 file - promoters50/4281690
gcaaaaagt

SEQ ID NO: 185639 - DNA, 9 bp, Unknown
  misc_feature (1)..( 9): Result.005 file - promoters50/4281690
ctaattaga

SEQ ID NO: 185640 - DNA, 8 bp, Unknown
  misc_feature (1)..( 8): Result.005 file - promoters50/4281698
aaaggctt

SEQ ID NO: 185641 - DNA, 8 bp, Unknown
  misc_feature (1)..( 8): Result.005 file - promoters50/4281698
aaaggcaa

SEQ ID NO: 185642 - DNA, 8 bp, Unknown
  misc_feature (1)..( 8): Result.005 file - promoters50/4281698
aaagtctt

SEQ ID NO: 185643 - DNA, 12 bp, Unknown
  misc_feature (1)..( 12): Result.005 file - promoters50/4281698
tgtcttcgattc

SEQ ID NO: 185644 - DNA, 12 bp, Unknown
  misc_feature (1)..( 12): Result.005 file - promoters50/4281698
tgtattcgattt

SEQ ID NO: 185645 - DNA, 12 bp, Unknown
  misc_feature (1)..( 12): Result.005 file - promoters50/4281698
ttcgttcgtttt

SEQ ID NO: 185646 - DNA, 20 bp, Unknown
  misc_feature (1)..( 20): Result.005 file - promoters50/4281711
cttttttaaaaaactatata

SEQ ID NO: 185647 - DNA, 20 bp, Unknown
  misc_feature (1)..( 20): Result.005 file - promoters50/4281711
cttatttaattgttatgaca

SEQ ID NO: 185648 - DNA, 21 bp, Unknown
  misc_feature (1)..( 21): Result.005 file - promoters50/4281711
attcatttgagtaaacaggtc

SEQ ID NO: 185649 - DNA, 21 bp, Unknown
  misc_feature (1)..( 21): Result.005 file - promoters50/4281711
ccaattttaagaaagtatata

SEQ ID NO: 185650 - DNA, 21 bp, Unknown
  misc_feature (1)..( 21): Result.005 file - promoters50/4281711
agagatttagaaagagatgtg

SEQ ID NO: 185651 - DNA, 21 bp, Unknown
  misc_feature (1)..( 21): Result.005 file - promoters50/4281711
ggagatttagggtagattcga

SEQ ID NO: 185652 - DNA, 7 bp, Unknown
  misc_feature (1)..( 7): Result.005 file - promoters50/4281711
gaataaa

SEQ ID NO: 185653 - DNA, 7 bp, Unknown
  misc_feature (1)..( 7): Result.005 file - promoters50/4281711
taataaa

SEQ ID NO: 185654 - DNA, 7 bp, Unknown
  misc_feature (1)..( 7): Result.005 file - promoters50/4281711
gaagaaa

SEQ ID NO: 185655 - DNA, 7 bp, Unknown
  misc_feature (1)..( 7): Result.005 file - promoters50/4281711
taataaa

SEQ ID NO: 185656 - DNA, 8 bp, Unknown
  misc_feature (1)..( 8): Result.005 file - promoters50/4281711
taattaaa

SEQ ID NO: 185657 - DNA, 8 bp, Unknown
  misc_feature (1)..( 8): Result.005 file - promoters50/4281711
tttattaa

SEQ ID NO: 185658 - DNA, 10 bp, Unknown
  misc_feature (1)..( 10): Result.005 file - promoters50/4281737
acctaaaaca

SEQ ID NO: 185659 - DNA, 10 bp, Unknown
  misc_feature (1)..( 10): Result.005 file - promoters50/4281737
atataaaacc

SEQ ID NO: 185660 - DNA, 10 bp, Unknown
  misc_feature (1)..( 10): Result.005 file - promoters50/4281737
ctataaaaaa

SEQ ID NO: 185661 - DNA, 10 bp, Unknown
  misc_feature (1)..( 10): Result.005 file - promoters50/4281737
atatacaaaa

SEQ ID NO: 185662 - DNA, 10 bp, Unknown
  misc_feature (1)..( 10): Result.005 file - promoters50/4281737
ctattaaagt

SEQ ID NO: 185663 - DNA, 10 bp, Unknown
  misc_feature (1)..( 10): Result.005 file - promoters50/4281737
taagaaaaaa

SEQ ID NO: 185664 - DNA, 13 bp, Unknown
  misc_feature (1)..( 13): Result.005 file - promoters50/4281744
attgtgttttacg

SEQ ID NO: 185665 - DNA, 13 bp, Unknown
  misc_feature (1)..( 13): Result.005 file - promoters50/4281744
aatgtgatttacg

SEQ ID NO: 185666 - DNA, 13 bp, Unknown
  misc_feature (1)..( 13): Result.005 file - promoters50/4281744
ttaatgatttcat

SEQ ID NO: 185667 - DNA, 13 bp, Unknown
  misc_feature (1)..( 13): Result.005 file - promoters50/4281744
tatccgaattatt

SEQ ID NO: 185668 - DNA, 13 bp, Unknown
  misc_feature (1)..( 13): Result.005 file - promoters50/4281744
ttattgatttcac

SEQ ID NO: 185669 - DNA, 13 bp, Unknown
  misc_feature (1)..( 13): Result.005 file - promoters50/4281744
aatatgaatttgc

SEQ ID NO: 185670 - DNA, 15 bp, Unknown
  misc_feature (1)..( 15): Result.005 file - promoters50/4281773
atgcatagtttatgg

SEQ ID NO: 185671 - DNA, 15 bp, Unknown
  misc_feature (1)..( 15): Result.005 file - promoters50/4281773
atgtatagttttgtg

SEQ ID NO: 185672 - DNA, 15 bp, Unknown
  misc_feature (1)..( 15): Result.005 file - promoters50/4281773
ttctgaagtttctgg

SEQ ID NO: 185673 - DNA, 15 bp, Unknown
  misc_feature (1)..( 15): Result.005 file - promoters50/4281773
acacattgttttgga

SEQ ID NO: 185674 - DNA, 15 bp, Unknown
  misc_feature (1)..( 15): Result.005 file - promoters50/4281773
gacctaagtttaagt

SEQ ID NO: 185675 - DNA, 15 bp, Unknown
  misc_feature (1)..( 15): Result.005 file - promoters50/4281773
ccgggaactttggtt

SEQ ID NO: 185676 - DNA, 9 bp, Unknown
  misc_feature (1)..( 9): Result.005 file - promoters50/4281773
aaagaaaaa

SEQ ID NO: 185677 - DNA, 9 bp, Unknown
  misc_feature (1)..( 9): Result.005 file - promoters50/4281773
caaggaaag

SEQ ID NO: 185678 - DNA, 10 bp, Unknown
  misc_feature (1)..( 10): Result.005 file - promoters50/4281773
caagaagaag

SEQ ID NO: 185679 - DNA, 10 bp, Unknown
  misc_feature (1)..( 10): Result.005 file - promoters50/4281773
aaaaaaaaag

SEQ ID NO: 185680 - DNA, 10 bp, Unknown
  misc_feature (1)..( 10): Result.005 file - promoters50/4281773
ggagaaaaaa

SEQ ID NO: 185681 - DNA, 10 bp, Unknown
  misc_feature (1)..( 10): Result.005 file - promoters50/4281773
acaaaaaagg

SEQ ID NO: 185682 - DNA, 11 bp, Unknown
  misc_feature (1)..( 11): Result.005 file - promoters50/4281830
caaacgtataa

SEQ ID NO: 185683 - DNA, 11 bp, Unknown
  misc_feature (1)..( 11): Result.005 file - promoters50/4281830
caaaagtaaat

SEQ ID NO: 185684 - DNA, 11 bp, Unknown
  misc_feature (1)..( 11): Result.005 file - promoters50/4281830
atgacgtttaa

SEQ ID NO: 185685 - DNA, 9 bp, Unknown
  misc_feature (1)..( 9): Result.005 file - promoters50/4281830
aaatatata

SEQ ID NO: 185686 - DNA, 9 bp, Unknown
  misc_feature (1)..( 9): Result.005 file - promoters50/4281830
tcatatata

SEQ ID NO: 185687 - DNA, 9 bp, Unknown
  misc_feature (1)..( 9): Result.005 file - promoters50/4281830
aaacatatc

SEQ ID NO: 185688 - DNA, 8 bp, Unknown
  misc_feature (1)..( 8): Result.005 file - promoters50/4281845
gaaaaaac

SEQ ID NO: 185689 - DNA, 8 bp, Unknown
  misc_feature (1)..( 8): Result.005 file - promoters50/4281845
taaaaaat

SEQ ID NO: 185690 - DNA, 8 bp, Unknown
  misc_feature (1)..( 8): Result.005 file - promoters50/4281845
taacaaat

SEQ ID NO: 185691 - DNA, 8 bp, Unknown
  misc_feature (1)..( 8): Result.005 file - promoters50/4281845
aaacaaat

SEQ ID NO: 185692 - DNA, 10 bp, Unknown
  misc_feature (1)..( 10): Result.005 file - promoters50/4281876
aatatacttt

SEQ ID NO: 185693 - DNA, 10 bp, Unknown
  misc_feature (1)..( 10): Result.005 file - promoters50/4281876
agtattctta

SEQ ID NO: 185694 - DNA, 10 bp, Unknown
  misc_feature (1)..( 10): Result.005 file - promoters50/4281876
ctcattatta

SEQ ID NO: 185695 - DNA, 10 bp, Unknown
  misc_feature (1)..( 10): Result.005 file - promoters50/4281876
agttttcttc

SEQ ID NO: 185696 - DNA, 10 bp, Unknown
  misc_feature (1)..( 10): Result.005 file - promoters50/4281876
cgttttctgt

SEQ ID NO: 185697 - DNA, 10 bp, Unknown
  misc_feature (1)..( 10): Result.005 file - promoters50/4281876
tttttttttc

SEQ ID NO: 185698 - DNA, 11 bp, Unknown
  misc_feature (1)..( 11): Result.005 file - promoters50/4281876
ttttgttttct

SEQ ID NO: 185699 - DNA, 11 bp, Unknown
  misc_feature (1)..( 11): Result.005 file - promoters50/4281876
cagcgttttct

SEQ ID NO: 185700 - DNA, 11 bp, Unknown
  misc_feature (1)..( 11): Result.005 file - promoters50/4281876
tttagttttct

SEQ ID NO: 185701 - DNA, 11 bp, Unknown
  misc_feature (1)..( 11): Result.005 file - promoters50/4281876
tttttttttca

SEQ ID NO: 185702 - DNA, 11 bp, Unknown
  misc_feature (1)..( 11): Result.005 file - promoters50/4281876
agaatttttgt

SEQ ID NO: 185703 - DNA, 11 bp, Unknown
  misc_feature (1)..( 11): Result.005 file - promoters50/4281876
ccattttatgt

SEQ ID NO: 185704 - DNA, 11 bp, Unknown
  misc_feature (1)..( 11): Result.005 file - promoters50/4281880
gatgagagtgc

SEQ ID NO: 185705 - DNA, 11 bp, Unknown
  misc_feature (1)..( 11): Result.005 file - promoters50/4281880
gattagatttt

SEQ ID NO: 185706 - DNA, 11 bp, Unknown
  misc_feature (1)..( 11): Result.005 file - promoters50/4281880
tatgagagatg

SEQ ID NO: 185707 - DNA, 11 bp, Unknown
  misc_feature (1)..( 11): Result.005 file - promoters50/4281880
tcttatatttt

SEQ ID NO: 185708 - DNA, 11 bp, Unknown
  misc_feature (1)..( 11): Result.005 file - promoters50/4281880
cattttacacc

SEQ ID NO: 185709 - DNA, 11 bp, Unknown
  misc_feature (1)..( 11): Result.005 file - promoters50/4281880
tatagtataat

SEQ ID NO: 185710 - DNA, 11 bp, Unknown
  misc_feature (1)..( 11): Result.005 file - promoters50/4281880
aatagtacaat

SEQ ID NO: 185711 - DNA, 11 bp, Unknown
  misc_feature (1)..( 11): Result.005 file - promoters50/4281880
tatagtaaatt

SEQ ID NO: 185712 - DNA, 11 bp, Unknown
  misc_feature (1)..( 11): Result.005 file - promoters50/4281880
catactaatta

SEQ ID NO: 185713 - DNA, 11 bp, Unknown
  misc_feature (1)..( 11): Result.005 file - promoters50/4281880
attagcataat

SEQ ID NO: 185714 - DNA, 12 bp, Unknown
  misc_feature (1)..( 12): Result.005 file - promoters50/4281896
tcgatttttaaa

SEQ ID NO: 185715 - DNA, 12 bp, Unknown
  misc_feature (1)..( 12): Result.005 file - promoters50/4281896
tttattattact

SEQ ID NO: 185716 - DNA, 12 bp, Unknown
  misc_feature (1)..( 12): Result.005 file - promoters50/4281896
tcgactttatct

SEQ ID NO: 185717 - DNA, 12 bp, Unknown
  misc_feature (1)..( 12): Result.005 file - promoters50/4281896
agcttttttaga

SEQ ID NO: 185718 - DNA, 12 bp, Unknown
  misc_feature (1)..( 12): Result.005 file - promoters50/4281896
aaaattaatatt

SEQ ID NO: 185719 - DNA, 12 bp, Unknown
  misc_feature (1)..( 12): Result.005 file - promoters50/4281925
tgcaataaaaat

SEQ ID NO: 185720 - DNA, 12 bp, Unknown
  misc_feature (1)..( 12): Result.005 file - promoters50/4281925
aaaaattaaaac

SEQ ID NO: 185721 - DNA, 12 bp, Unknown
  misc_feature (1)..( 12): Result.005 file - promoters50/4281925
actaatcaaact

SEQ ID NO: 185722 - DNA, 12 bp, Unknown
  misc_feature (1)..( 12): Result.005 file - promoters50/4281925
taaaataacaca

SEQ ID NO: 185723 - DNA, 12 bp, Unknown
  misc_feature (1)..( 12): Result.005 file - promoters50/4281925
tataatatattc

SEQ ID NO: 185724 - DNA, 12 bp, Unknown
  misc_feature (1)..( 12): Result.005 file - promoters50/4281925
ttaaattattat

SEQ ID NO: 185725 - DNA, 12 bp, Unknown
  misc_feature (1)..( 12): Result.005 file - promoters50/4281925
aaaaattatact

SEQ ID NO: 185726 - DNA, 12 bp, Unknown
  misc_feature (1)..( 12): Result.005 file - promoters50/4281925
catactattaga

SEQ ID NO: 185727 - DNA, 14 bp, Unknown
  misc_feature (1)..( 14): Result.005 file - promoters50/4281925
atatctaaaagtag

SEQ ID NO: 185728 - DNA, 14 bp, Unknown
  misc_feature (1)..( 14): Result.005 file - promoters50/4281925
atttataaatgtat

SEQ ID NO: 185729 - DNA, 14 bp, Unknown
  misc_feature (1)..( 14): Result.005 file - promoters50/4281925
ttgaatgaaactag

SEQ ID NO: 185730 - DNA, 14 bp, Unknown
  misc_feature (1)..( 14): Result.005 file - promoters50/4281925
tatatacaaaatag

SEQ ID NO: 185731 - DNA, 14 bp, Unknown
  misc_feature (1)..( 14): Result.005 file - promoters50/4281925
aagactataaatat

SEQ ID NO: 185732 - DNA, 14 bp, Unknown
  misc_feature (1)..( 14): Result.005 file - promoters50/4281925
taatctaaatgcca

SEQ ID NO: 185733 - DNA, 14 bp, Unknown
  misc_feature (1)..( 14): Result.005 file - promoters50/4281925
aagattataaaaaa

SEQ ID NO: 185734 - DNA, 10 bp, Unknown
  misc_feature (1)..( 10): Result.005 file - promoters50/4281925
tgaattttta

SEQ ID NO: 185735 - DNA, 10 bp, Unknown
  misc_feature (1)..( 10): Result.005 file - promoters50/4281925
tgaagtttgg

SEQ ID NO: 185736 - DNA, 11 bp, Unknown
  misc_feature (1)..( 11): Result.005 file - promoters50/4281925
taaattattat

SEQ ID NO: 185737 - DNA, 11 bp, Unknown
  misc_feature (1)..( 11): Result.005 file - promoters50/4281925
ctaagttagtt

SEQ ID NO: 185738 - DNA, 11 bp, Unknown
  misc_feature (1)..( 11): Result.005 file - promoters50/4281925
aaaaattaaaa

SEQ ID NO: 185739 - DNA, 11 bp, Unknown
  misc_feature (1)..( 11): Result.005 file - promoters50/4281925
acaaaaattat

SEQ ID NO: 185740 - DNA, 9 bp, Unknown
  misc_feature (1)..( 9): Result.005 file - promoters50/4281961
aaagattgt

SEQ ID NO: 185741 - DNA, 9 bp, Unknown
  misc_feature (1)..( 9): Result.005 file - promoters50/4281961
gaagattga

SEQ ID NO: 185742 - DNA, 9 bp, Unknown
  misc_feature (1)..( 9): Result.005 file - promoters50/4281961
aaagattcc

SEQ ID NO: 185743 - DNA, 9 bp, Unknown
  misc_feature (1)..( 9): Result.005 file - promoters50/4281961
aaagcttgg

SEQ ID NO: 185744 - DNA, 9 bp, Unknown
  misc_feature (1)..( 9): Result.005 file - promoters50/4281961
agagattgt

SEQ ID NO: 185745 - DNA, 9 bp, Unknown
  misc_feature (1)..( 9): Result.005 file - promoters50/4281961
aaaaattta

SEQ ID NO: 185746 - DNA, 7 bp, Unknown
  misc_feature (1)..( 7): Result.005 file - promoters50/4281994
tatattt

SEQ ID NO: 185747 - DNA, 7 bp, Unknown
  misc_feature (1)..( 7): Result.005 file - promoters50/4281994
aatattt

SEQ ID NO: 185748 - DNA, 7 bp, Unknown
  misc_feature (1)..( 7): Result.005 file - promoters50/4281994
aatatta

SEQ ID NO: 185749 - DNA, 9 bp, Unknown
  misc_feature (1)..( 9): Result.005 file - promoters50/4281994
ataaaatta

SEQ ID NO: 185750 - DNA, 9 bp, Unknown
  misc_feature (1)..( 9): Result.005 file - promoters50/4281994
ataaaaatt

SEQ ID NO: 185751 - DNA, 9 bp, Unknown
  misc_feature (1)..( 9): Result.005 file - promoters50/4281994
ataatatta

SEQ ID NO: 185752 - DNA, 9 bp, Unknown
  misc_feature (1)..( 9): Result.005 file - promoters50/4281994
ataaaatta

SEQ ID NO: 185753 - DNA, 9 bp, Unknown
  misc_feature (1)..( 9): Result.005 file - promoters50/4281994
taaaaattt

SEQ ID NO: 185754 - DNA, 9 bp, Unknown
  misc_feature (1)..( 9): Result.005 file - promoters50/4281994
ataatatta

SEQ ID NO: 185755 - DNA, 10 bp, Unknown
  misc_feature (1)..( 10): Result.005 file - promoters50/4281994
attttaattt

SEQ ID NO: 185756 - DNA, 10 bp, Unknown
  misc_feature (1)..( 10): Result.005 file - promoters50/4281994
attttaaagt

SEQ ID NO: 185757 - DNA, 10 bp, Unknown
  misc_feature (1)..( 10): Result.005 file - promoters50/4281994
ttttcaattt

SEQ ID NO: 185758 - DNA, 9 bp, Unknown
  misc_feature (1)..( 9): Result.005 file - promoters50/4281994
tataactta

SEQ ID NO: 185759 - DNA, 9 bp, Unknown
  misc_feature (1)..( 9): Result.005 file - promoters50/4281994
attaaatta

SEQ ID NO: 185760 - DNA, 9 bp, Unknown
  misc_feature (1)..( 9): Result.005 file - promoters50/4281994
tataaaact

SEQ ID NO: 185761 - DNA, 15 bp, Unknown
  misc_feature (1)..( 15): Result.005 file - promoters50/4281997
agtttagggaaaatg

SEQ ID NO: 185762 - DNA, 15 bp, Unknown
  misc_feature (1)..( 15): Result.005 file - promoters50/4281997
agtttagggaaaatg

SEQ ID NO: 185763 - DNA, 15 bp, Unknown
  misc_feature (1)..( 15): Result.005 file - promoters50/4281997
ttagagcagaaaatg

SEQ ID NO: 185764 - DNA, 7 bp, Unknown
  misc_feature (1)..( 7): Result.005 file - promoters50/4281997
aattatc

SEQ ID NO: 185765 - DNA, 7 bp, Unknown
  misc_feature (1)..( 7): Result.005 file - promoters50/4281997
cattatc

SEQ ID NO: 185766 - DNA, 7 bp, Unknown
  misc_feature (1)..( 7): Result.005 file - promoters50/4281997
aattatc

SEQ ID NO: 185767 - DNA, 7 bp, Unknown
  misc_feature (1)..( 7): Result.005 file - promoters50/4281997
cattata

SEQ ID NO: 185768 - DNA, 8 bp, Unknown
  misc_feature (1)..( 8): Result.005 file - promoters50/4281997
aatgtttt

SEQ ID NO: 185769 - DNA, 8 bp, Unknown
  misc_feature (1)..( 8): Result.005 file - promoters50/4281997
aatatttt

SEQ ID NO: 185770 - DNA, 8 bp, Unknown
  misc_feature (1)..( 8): Result.005 file - promoters50/4281997
aatgtttt

SEQ ID NO: 185771 - DNA, 6 bp, Unknown
  misc_feature (1)..( 6): Result.005 file - promoters50/4281997
ttttac

SEQ ID NO: 185772 - DNA, 6 bp, Unknown
  misc_feature (1)..( 6): Result.005 file - promoters50/4281997
ttttac

SEQ ID NO: 185773 - DNA, 6 bp, Unknown
  misc_feature (1)..( 6): Result.005 file - promoters50/4281997
ttttac

SEQ ID NO: 185774 - DNA, 9 bp, Unknown
  misc_feature (1)..( 9): Result.005 file - promoters50/4281997
acattcaat

SEQ ID NO: 185775 - DNA, 9 bp, Unknown
  misc_feature (1)..( 9): Result.005 file - promoters50/4281997
acatttaat

SEQ ID NO: 185776 - DNA, 9 bp, Unknown
  misc_feature (1)..( 9): Result.005 file - promoters50/4281997
acattcaat

SEQ ID NO: 185777 - DNA, 6 bp, Unknown
  misc_feature (1)..( 6): Result.005 file - promoters50/4281997
cattat

SEQ ID NO: 185778 - DNA, 6 bp, Unknown
  misc_feature (1)..( 6): Result.005 file - promoters50/4281997
cattat

SEQ ID NO: 185779 - DNA, 6 bp, Unknown
  misc_feature (1)..( 6): Result.005 file - promoters50/4281997
cattat

SEQ ID NO: 185780 - DNA, 7 bp, Unknown
  misc_feature (1)..( 7): Result.005 file - promoters50/4281997
acgcaaa

SEQ ID NO: 185781 - DNA, 7 bp, Unknown
  misc_feature (1)..( 7): Result.005 file - promoters50/4281997
acggaaa

SEQ ID NO: 185782 - DNA, 7 bp, Unknown
  misc_feature (1)..( 7): Result.005 file - promoters50/4281997
acgcaaa

SEQ ID NO: 185783 - DNA, 7 bp, Unknown
  misc_feature (1)..( 7): Result.005 file - promoters50/4282012
aaattat

SEQ ID NO: 185784 - DNA, 7 bp, Unknown
  misc_feature (1)..( 7): Result.005 file - promoters50/4282012
aaattat

SEQ ID NO: 185785 - DNA, 7 bp, Unknown
  misc_feature (1)..( 7): Result.005 file - promoters50/4282012
caattat

SEQ ID NO: 185786 - DNA, 9 bp, Unknown
  misc_feature (1)..( 9): Result.005 file - promoters50/4282059
cgaaacttc

SEQ ID NO: 185787 - DNA, 9 bp, Unknown
  misc_feature (1)..( 9): Result.005 file - promoters50/4282059
aaaaacttt

SEQ ID NO: 185788 - DNA, 9 bp, Unknown
  misc_feature (1)..( 9): Result.005 file - promoters50/4282059
aaaaacttt

SEQ ID NO: 185789 - DNA, 8 bp, Unknown
  misc_feature (1)..( 8): Result.005 file - promoters50/4282066
gataaaga

SEQ ID NO: 185790 - DNA, 8 bp, Unknown
  misc_feature (1)..( 8): Result.005 file - promoters50/4282066
gataaaga

SEQ ID NO: 185791 - DNA, 8 bp, Unknown
  misc_feature (1)..( 8): Result.005 file - promoters50/4282066
gattaaga

SEQ ID NO: 185792 - DNA, 8 bp, Unknown
  misc_feature (1)..( 8): Result.005 file - promoters50/4282066
gataaaat

SEQ ID NO: 185793 - DNA, 8 bp, Unknown
  misc_feature (1)..( 8): Result.005 file - promoters50/4282066
gaagttga

SEQ ID NO: 185794 - DNA, 8 bp, Unknown
  misc_feature (1)..( 8): Result.005 file - promoters50/4282066
gaagttga

SEQ ID NO: 185795 - DNA, 8 bp, Unknown
  misc_feature (1)..( 8): Result.005 file - promoters50/4282066
gaatttgt

SEQ ID NO: 185796 - DNA, 11 bp, Unknown
  misc_feature (1)..( 11): Result.005 file - promoters50/4282066
tgaagttgact

SEQ ID NO: 185797 - DNA, 11 bp, Unknown
  misc_feature (1)..( 11): Result.005 file - promoters50/4282066
gggagttcact

SEQ ID NO: 185798 - DNA, 11 bp, Unknown
  misc_feature (1)..( 11): Result.005 file - promoters50/4282066
tgaatttgtac

SEQ ID NO: 185799 - DNA, 10 bp, Unknown
  misc_feature (1)..( 10): Result.005 file - promoters50/4282066
cagttttttt

SEQ ID NO: 185800 - DNA, 10 bp, Unknown
  misc_feature (1)..( 10): Result.005 file - promoters50/4282066
gagtgttttt

SEQ ID NO: 185801 - DNA, 10 bp, Unknown
  misc_feature (1)..( 10): Result.005 file - promoters50/4282066
gagagtttta

SEQ ID NO: 185802 - DNA, 8 bp, Unknown
  misc_feature (1)..( 8): Result.005 file - promoters50/4282066
tggatcgg

SEQ ID NO: 185803 - DNA, 8 bp, Unknown
  misc_feature (1)..( 8): Result.005 file - promoters50/4282066
tggttcgg

SEQ ID NO: 185804 - DNA, 8 bp, Unknown
  misc_feature (1)..( 8): Result.005 file - promoters50/4282066
tggatcgg

SEQ ID NO: 185805 - DNA, 7 bp, Unknown
  misc_feature (1)..( 7): Result.005 file - promoters50/4282066
agtttga

SEQ ID NO: 185806 - DNA, 7 bp, Unknown
  misc_feature (1)..( 7): Result.005 file - promoters50/4282066
ggtttga

SEQ ID NO: 185807 - DNA, 7 bp, Unknown
  misc_feature (1)..( 7): Result.005 file - promoters50/4282066
ggtgtga

SEQ ID NO: 185808 - DNA, 7 bp, Unknown
  misc_feature (1)..( 7): Result.005 file - promoters50/4282072
caacaac

SEQ ID NO: 185809 - DNA, 7 bp, Unknown
  misc_feature (1)..( 7): Result.005 file - promoters50/4282072
caaaaac

SEQ ID NO: 185810 - DNA, 7 bp, Unknown
  misc_feature (1)..( 7): Result.005 file - promoters50/4282072
caacaat

SEQ ID NO: 185811 - DNA, 7 bp, Unknown
  misc_feature (1)..( 7): Result.005 file - promoters50/4282072
caaaaat

SEQ ID NO: 185812 - DNA, 9 bp, Unknown
  misc_feature (1)..( 9): Result.005 file - promoters50/4282072
aacaacatc

SEQ ID NO: 185813 - DNA, 9 bp, Unknown
  misc_feature (1)..( 9): Result.005 file - promoters50/4282072
ttcaaaatc

SEQ ID NO: 185814 - DNA, 9 bp, Unknown
  misc_feature (1)..( 9): Result.005 file - promoters50/4282072
ttcaaaaat

SEQ ID NO: 185815 - DNA, 9 bp, Unknown
  misc_feature (1)..( 9): Result.005 file - promoters50/4282072
ctcaaaaat

SEQ ID NO: 185816 - DNA, 9 bp, Unknown
  misc_feature (1)..( 9): Result.005 file - promoters50/4282072
ctttctttt

SEQ ID NO: 185817 - DNA, 9 bp, Unknown
  misc_feature (1)..( 9): Result.005 file - promoters50/4282072
atttgtttt

SEQ ID NO: 185818 - DNA, 9 bp, Unknown
  misc_feature (1)..( 9): Result.005 file - promoters50/4282072
acatgtttt

SEQ ID NO: 185819 - DNA, 9 bp, Unknown
  misc_feature (1)..( 9): Result.005 file - promoters50/4282072
atttgtgac

SEQ ID NO: 185820 - DNA, 10 bp, Unknown
  misc_feature (1)..( 10): Result.005 file - promoters50/4282086
gctctgcttt

SEQ ID NO: 185821 - DNA, 10 bp, Unknown
  misc_feature (1)..( 10): Result.005 file - promoters50/4282086
aatctgcttt

SEQ ID NO: 185822 - DNA, 10 bp, Unknown
  misc_feature (1)..( 10): Result.005 file - promoters50/4282086
aatttgctcc

SEQ ID NO: 185823 - DNA, 11 bp, Unknown
  misc_feature (1)..( 11): Result.005 file - promoters50/4282126
aatttatagtt

SEQ ID NO: 185824 - DNA, 11 bp, Unknown
  misc_feature (1)..( 11): Result.005 file - promoters50/4282126
aatttaaaaga

SEQ ID NO: 185825 - DNA, 11 bp, Unknown
  misc_feature (1)..( 11): Result.005 file - promoters50/4282126
aatttattgtt

SEQ ID NO: 185826 - DNA, 8 bp, Unknown
  misc_feature (1)..( 8): Result.005 file - promoters50/4282126
tttctaat

SEQ ID NO: 185827 - DNA, 8 bp, Unknown
  misc_feature (1)..( 8): Result.005 file - promoters50/4282126
tttgtaat

SEQ ID NO: 185828 - DNA, 8 bp, Unknown
  misc_feature (1)..( 8): Result.005 file - promoters50/4282126
tttgcaat

SEQ ID NO: 185829 - DNA, 8 bp, Unknown
  misc_feature (1)..( 8): Result.005 file - promoters50/4282145
gagacaaa

SEQ ID NO: 185830 - DNA, 8 bp, Unknown
  misc_feature (1)..( 8): Result.005 file - promoters50/4282145
ttgacaaa

SEQ ID NO: 185831 - DNA, 8 bp, Unknown
  misc_feature (1)..( 8): Result.005 file - promoters50/4282145
ttggcaat

SEQ ID NO: 185832 - DNA, 8 bp, Unknown
  misc_feature (1)..( 8): Result.005 file - promoters50/4282145
aatactaa

SEQ ID NO: 185833 - DNA, 8 bp, Unknown
  misc_feature (1)..( 8): Result.005 file - promoters50/4282145
tataataa

SEQ ID NO: 185834 - DNA, 8 bp, Unknown
  misc_feature (1)..( 8): Result.005 file - promoters50/4282145
tattatac

SEQ ID NO: 185835 - DNA, 11 bp, Unknown
  misc_feature (1)..( 11): Result.005 file - promoters50/4282145
aataaaagtaa

SEQ ID NO: 185836 - DNA, 11 bp, Unknown
  misc_feature (1)..( 11): Result.005 file - promoters50/4282145
aattaaatatt

SEQ ID NO: 185837 - DNA, 11 bp, Unknown
  misc_feature (1)..( 11): Result.005 file - promoters50/4282145
gctaaaagact

SEQ ID NO: 185838 - DNA, 11 bp, Unknown
  misc_feature (1)..( 11): Result.005 file - promoters50/4282145
gcaaaaagtaa

SEQ ID NO: 185839 - DNA, 10 bp, Unknown
  misc_feature (1)..( 10): Result.005 file - promoters50/4282145
agagatgatt

SEQ ID NO: 185840 - DNA, 10 bp, Unknown
  misc_feature (1)..( 10): Result.005 file - promoters50/4282145
gaaaatgatt

SEQ ID NO: 185841 - DNA, 10 bp, Unknown
  misc_feature (1)..( 10): Result.005 file - promoters50/4282145
gaaactgata

SEQ ID NO: 185842 - DNA, 10 bp, Unknown
  misc_feature (1)..( 10): Result.005 file - promoters50/4282145
gaagatgatt

SEQ ID NO: 185843 - DNA, 8 bp, Unknown
  misc_feature (1)..( 8): Result.005 file - promoters50/4282145
aaattaca

SEQ ID NO: 185844 - DNA, 8 bp, Unknown
  misc_feature (1)..( 8): Result.005 file - promoters50/4282145
aaattaac

SEQ ID NO: 185845 - DNA, 8 bp, Unknown
  misc_feature (1)..( 8): Result.005 file - promoters50/4282145
gaatgaca

SEQ ID NO: 185846 - DNA, 10 bp, Unknown
  misc_feature (1)..( 10): Result.005 file - promoters50/4282182
tgaatgaaac

SEQ ID NO: 185847 - DNA, 10 bp, Unknown
  misc_feature (1)..( 10): Result.005 file - promoters50/4282182
tgactgattt

SEQ ID NO: 185848 - DNA, 10 bp, Unknown
  misc_feature (1)..( 10): Result.005 file - promoters50/4282182
taaataaaag

SEQ ID NO: 185849 - DNA, 10 bp, Unknown
  misc_feature (1)..( 10): Result.005 file - promoters50/4282182
agaaagaaag

SEQ ID NO: 185850 - DNA, 10 bp, Unknown
  misc_feature (1)..( 10): Result.005 file - promoters50/4282182
tcactaattc

SEQ ID NO: 185851 - DNA, 10 bp, Unknown
  misc_feature (1)..( 10): Result.005 file - promoters50/4282182
gaaaacaaaa

SEQ ID NO: 185852 - DNA, 11 bp, Unknown
  misc_feature (1)..( 11): Result.005 file - promoters50/4282182
acaaaatttat

SEQ ID NO: 185853 - DNA, 11 bp, Unknown
  misc_feature (1)..( 11): Result.005 file - promoters50/4282182
acaacatttaa

SEQ ID NO: 185854 - DNA, 11 bp, Unknown
  misc_feature (1)..( 11): Result.005 file - promoters50/4282182
cgaaaaataaa

SEQ ID NO: 185855 - DNA, 11 bp, Unknown
  misc_feature (1)..( 11): Result.005 file - promoters50/4282182
gactgatttaa

SEQ ID NO: 185856 - DNA, 11 bp, Unknown
  misc_feature (1)..( 11): Result.005 file - promoters50/4282182
agaaaaaacca

SEQ ID NO: 185857 - DNA, 11 bp, Unknown
  misc_feature (1)..( 11): Result.005 file - promoters50/4282182
tggaaaacaaa

SEQ ID NO: 185858 - DNA, 11 bp, Unknown
  misc_feature (1)..( 11): Result.005 file - promoters50/4282182
agagaaagaaa

SEQ ID NO: 185859 - DNA, 10 bp, Unknown
  misc_feature (1)..( 10): Result.005 file - promoters50/4282182
accttttttt

SEQ ID NO: 185860 - DNA, 10 bp, Unknown
  misc_feature (1)..( 10): Result.005 file - promoters50/4282182
ttcttgtttg

SEQ ID NO: 185861 - DNA, 11 bp, Unknown
  misc_feature (1)..( 11): Result.005 file - promoters50/4282182
acctttatttt

SEQ ID NO: 185862 - DNA, 11 bp, Unknown
  misc_feature (1)..( 11): Result.005 file - promoters50/4282182
tatattgtata

SEQ ID NO: 185863 - DNA, 11 bp, Unknown
  misc_feature (1)..( 11): Result.005 file - promoters50/4282182
ccaaatgtttg

SEQ ID NO: 185864 - DNA, 11 bp, Unknown
  misc_feature (1)..( 11): Result.005 file - promoters50/4282182
gccattatctt

SEQ ID NO: 185865 - DNA, 10 bp, Unknown
  misc_feature (1)..( 10): Result.005 file - promoters50/4282186
attttgttaa

SEQ ID NO: 185866 - DNA, 10 bp, Unknown
  misc_feature (1)..( 10): Result.005 file - promoters50/4282186
tttttgtttt

SEQ ID NO: 185867 - DNA, 10 bp, Unknown
  misc_feature (1)..( 10): Result.005 file - promoters50/4282186
attttggtca

SEQ ID NO: 185868 - DNA, 10 bp, Unknown
  misc_feature (1)..( 10): Result.005 file - promoters50/4282186
tttttgttta

SEQ ID NO: 185869 - DNA, 10 bp, Unknown
  misc_feature (1)..( 10): Result.005 file - promoters50/4282186
tgtttatttg

SEQ ID NO: 185870 - DNA, 10 bp, Unknown
  misc_feature (1)..( 10): Result.005 file - promoters50/4282186
tttttatttc

SEQ ID NO: 185871 - DNA, 14 bp, Unknown
  misc_feature (1)..( 14): Result.005 file - promoters50/4282186
ctaaaattttcaat

SEQ ID NO: 185872 - DNA, 14 bp, Unknown
  misc_feature (1)..( 14): Result.005 file - promoters50/4282186
atcaaatttgttat

SEQ ID NO: 185873 - DNA, 14 bp, Unknown
  misc_feature (1)..( 14): Result.005 file - promoters50/4282186
atgaaatttttcgt

SEQ ID NO: 185874 - DNA, 14 bp, Unknown
  misc_feature (1)..( 14): Result.005 file - promoters50/4282186
caaaaatttatgta

SEQ ID NO: 185875 - DNA, 14 bp, Unknown
  misc_feature (1)..( 14): Result.005 file - promoters50/4282186
cgatcttttctcgt

SEQ ID NO: 185876 - DNA, 14 bp, Unknown
  misc_feature (1)..( 14): Result.005 file - promoters50/4282186
caaaaagcaaaaaa

SEQ ID NO: 185877 - DNA, 12 bp, Unknown
  misc_feature (1)..( 12): Result.005 file - promoters50/4282198
aaataaaatgaa

SEQ ID NO: 185878 - DNA, 12 bp, Unknown
  misc_feature (1)..( 12): Result.005 file - promoters50/4282198
acgtaaaaggaa

SEQ ID NO: 185879 - DNA, 12 bp, Unknown
  misc_feature (1)..( 12): Result.005 file - promoters50/4282198
aattaaacaaag

SEQ ID NO: 185880 - DNA, 14 bp, Unknown
  misc_feature (1)..( 14): Result.005 file - promoters50/4282198
ccactaatacaaca

SEQ ID NO: 185881 - DNA, 14 bp, Unknown
  misc_feature (1)..( 14): Result.005 file - promoters50/4282198
ccattaatacaaat

SEQ ID NO: 185882 - DNA, 14 bp, Unknown
  misc_feature (1)..( 14): Result.005 file - promoters50/4282198
ggaataacacaaca

SEQ ID NO: 185883 - DNA, 15 bp, Unknown
  misc_feature (1)..( 15): Result.005 file - promoters50/4282202
aaatagaaaacatac

SEQ ID NO: 185884 - DNA, 15 bp, Unknown
  misc_feature (1)..( 15): Result.005 file - promoters50/4282202
caaccaaaaccatac

SEQ ID NO: 185885 - DNA, 15 bp, Unknown
  misc_feature (1)..( 15): Result.005 file - promoters50/4282202
aaataaaaaacaaaa

SEQ ID NO: 185886 - DNA, 15 bp, Unknown
  misc_feature (1)..( 15): Result.005 file - promoters50/4282202
actacgaatacattc

SEQ ID NO: 185887 - DNA, 8 bp, Unknown
  misc_feature (1)..( 8): Result.005 file - promoters50/4282202
caaaacca

SEQ ID NO: 185888 - DNA, 8 bp, Unknown
  misc_feature (1)..( 8): Result.005 file - promoters50/4282202
caaaacat

SEQ ID NO: 185889 - DNA, 8 bp, Unknown
  misc_feature (1)..( 8): Result.005 file - promoters50/4282202
caagacat

SEQ ID NO: 185890 - DNA, 8 bp, Unknown
  misc_feature (1)..( 8): Result.005 file - promoters50/4282202
caaaacaa

SEQ ID NO: 185891 - DNA, 10 bp, Unknown
  misc_feature (1)..( 10): Result.005 file - promoters50/4282251
gaacaagaaa

SEQ ID NO: 185892 - DNA, 10 bp, Unknown
  misc_feature (1)..( 10): Result.005 file - promoters50/4282251
gttcaaaaaa

SEQ ID NO: 185893 - DNA, 10 bp, Unknown
  misc_feature (1)..( 10): Result.005 file - promoters50/4282251
gttcgaaact

SEQ ID NO: 185894 - DNA, 8 bp, Unknown
  misc_feature (1)..( 8): Result.005 file - promoters50/4282251
caaataag

SEQ ID NO: 185895 - DNA, 8 bp, Unknown
  misc_feature (1)..( 8): Result.005 file - promoters50/4282251
caaaaaag

SEQ ID NO: 185896 - DNA, 8 bp, Unknown
  misc_feature (1)..( 8): Result.005 file - promoters50/4282251
caaatatg

SEQ ID NO: 185897 - DNA, 8 bp, Unknown
  misc_feature (1)..( 8): Result.005 file - promoters50/4282251
tgaatgat

SEQ ID NO: 185898 - DNA, 8 bp, Unknown
  misc_feature (1)..( 8): Result.005 file - promoters50/4282251
agaaggat

SEQ ID NO: 185899 - DNA, 8 bp, Unknown
  misc_feature (1)..( 8): Result.005 file - promoters50/4282251
tgattgag

SEQ ID NO: 185900 - DNA, 12 bp, Unknown
  misc_feature (1)..( 12): Result.005 file - promoters50/4282251
gtagatttgtat

SEQ ID NO: 185901 - DNA, 12 bp, Unknown
  misc_feature (1)..( 12): Result.005 file - promoters50/4282251
gtacatttgtaa

SEQ ID NO: 185902 - DNA, 12 bp, Unknown
  misc_feature (1)..( 12): Result.005 file - promoters50/4282251
gttggtttgtat

SEQ ID NO: 185903 - DNA, 7 bp, Unknown
  misc_feature (1)..( 7): Result.005 file - promoters50/4282292
aaattag

SEQ ID NO: 185904 - DNA, 7 bp, Unknown
  misc_feature (1)..( 7): Result.005 file - promoters50/4282292
aaattaa

SEQ ID NO: 185905 - DNA, 7 bp, Unknown
  misc_feature (1)..( 7): Result.005 file - promoters50/4282292
aaaataa

SEQ ID NO: 185906 - DNA, 8 bp, Unknown
  misc_feature (1)..( 8): Result.005 file - promoters50/4282292
aaaacaaa

SEQ ID NO: 185907 - DNA, 8 bp, Unknown
  misc_feature (1)..( 8): Result.005 file - promoters50/4282292
aaagcaaa

SEQ ID NO: 185908 - DNA, 9 bp, Unknown
  misc_feature (1)..( 9): Result.005 file - promoters50/4282292
acagctaaa

SEQ ID NO: 185909 - DNA, 8 bp, Unknown
  misc_feature (1)..( 8): Result.005 file - promoters50/4282308
gttacaat

SEQ ID NO: 185910 - DNA, 8 bp, Unknown
  misc_feature (1)..( 8): Result.005 file - promoters50/4282308
gttccaat

SEQ ID NO: 185911 - DNA, 8 bp, Unknown
  misc_feature (1)..( 8): Result.005 file - promoters50/4282308
gttacaag

SEQ ID NO: 185912 - DNA, 10 bp, Unknown
  misc_feature (1)..( 10): Result.005 file - promoters50/4282308
caattaatac

SEQ ID NO: 185913 - DNA, 10 bp, Unknown
  misc_feature (1)..( 10): Result.005 file - promoters50/4282308
tgattattac

SEQ ID NO: 185914 - DNA, 10 bp, Unknown
  misc_feature (1)..( 10): Result.005 file - promoters50/4282308
tgattattgc

SEQ ID NO: 185915 - DNA, 14 bp, Unknown
  misc_feature (1)..( 14): Result.005 file - promoters50/4282308
aatgagtaatatac

SEQ ID NO: 185916 - DNA, 14 bp, Unknown
  misc_feature (1)..( 14): Result.005 file - promoters50/4282308
aataagttatatac

SEQ ID NO: 185917 - DNA, 14 bp, Unknown
  misc_feature (1)..( 14): Result.005 file - promoters50/4282308
cctaatttatcatt

SEQ ID NO: 185918 - DNA, 6 bp, Unknown
  misc_feature (1)..( 6): Result.005 file - promoters50/4282308
tcaaaa

SEQ ID NO: 185919 - DNA, 6 bp, Unknown
  misc_feature (1)..( 6): Result.005 file - promoters50/4282308
tcaaaa

SEQ ID NO: 185920 - DNA, 6 bp, Unknown
  misc_feature (1)..( 6): Result.005 file - promoters50/4282308
tcaaaa

SEQ ID NO: 185921 - DNA, 18 bp, Unknown
  misc_feature (1)..( 18): Result.005 file - promoters50/4282316
aaatgtttttaccataat

SEQ ID NO: 185922 - DNA, 18 bp, Unknown
  misc_feature (1)..( 18): Result.005 file - promoters50/4282316
caatattttactaatctc

SEQ ID NO: 185923 - DNA, 18 bp, Unknown
  misc_feature (1)..( 18): Result.005 file - promoters50/4282316
aaaagtttagggaaaatg

SEQ ID NO: 185924 - DNA, 15 bp, Unknown
  misc_feature (1)..( 15): Result.005 file - promoters50/4282316
agtttagggaaaatg

SEQ ID NO: 185925 - DNA, 7 bp, Unknown
  misc_feature (1)..( 7): Result.005 file - promoters50/4282316
cattata

SEQ ID NO: 185926 - DNA, 7 bp, Unknown
  misc_feature (1)..( 7): Result.005 file - promoters50/4282316
cattatc

SEQ ID NO: 185927 - DNA, 7 bp, Unknown
  misc_feature (1)..( 7): Result.005 file - promoters50/4282316
aattatc

SEQ ID NO: 185928 - DNA, 7 bp, Unknown
  misc_feature (1)..( 7): Result.005 file - promoters50/4282316
aattatc

SEQ ID NO: 185929 - DNA, 7 bp, Unknown
  misc_feature (1)..( 7): Result.005 file - promoters50/4282316
gaaaatg

SEQ ID NO: 185930 - DNA, 7 bp, Unknown
  misc_feature (1)..( 7): Result.005 file - promoters50/4282316
gaaaatg

SEQ ID NO: 185931 - DNA, 7 bp, Unknown
  misc_feature (1)..( 7): Result.005 file - promoters50/4282316
gaaaatg

SEQ ID NO: 185932 - DNA, 8 bp, Unknown
  misc_feature (1)..( 8): Result.005 file - promoters50/4282316
aatatttt

SEQ ID NO: 185933 - DNA, 8 bp, Unknown
  misc_feature (1)..( 8): Result.005 file - promoters50/4282316
aatgtttt

SEQ ID NO: 185934 - DNA, 8 bp, Unknown
  misc_feature (1)..( 8): Result.005 file - promoters50/4282316
aatgtttt

SEQ ID NO: 185935 - DNA, 6 bp, Unknown
  misc_feature (1)..( 6): Result.005 file - promoters50/4282316
ttttac

SEQ ID NO: 185936 - DNA, 6 bp, Unknown
  misc_feature (1)..( 6): Result.005 file - promoters50/4282316
ttttac

SEQ ID NO: 185937 - DNA, 6 bp, Unknown
  misc_feature (1)..( 6): Result.005 file - promoters50/4282316
ttttac

SEQ ID NO: 185938 - DNA, 9 bp, Unknown
  misc_feature (1)..( 9): Result.005 file - promoters50/4282316
acatttaat

SEQ ID NO: 185939 - DNA, 9 bp, Unknown
  misc_feature (1)..( 9): Result.005 file - promoters50/4282316
acattcaat

SEQ ID NO: 185940 - DNA, 9 bp, Unknown
  misc_feature (1)..( 9): Result.005 file - promoters50/4282316
acattcaat

SEQ ID NO: 185941 - DNA, 6 bp, Unknown
  misc_feature (1)..( 6): Result.005 file - promoters50/4282316
cattat

SEQ ID NO: 185942 - DNA, 6 bp, Unknown
  misc_feature (1)..( 6): Result.005 file - promoters50/4282316
cattat

SEQ ID NO: 185943 - DNA, 6 bp, Unknown
  misc_feature (1)..( 6): Result.005 file - promoters50/4282316
cattat

SEQ ID NO: 185944 - DNA, 7 bp, Unknown
  misc_feature (1)..( 7): Result.005 file - promoters50/4282316
acggaaa

SEQ ID NO: 185945 - DNA, 7 bp, Unknown
  misc_feature (1)..( 7): Result.005 file - promoters50/4282316
acgcaaa

SEQ ID NO: 185946 - DNA, 7 bp, Unknown
  misc_feature (1)..( 7): Result.005 file - promoters50/4282316
acgcaaa

SEQ ID NO: 185947 - DNA, 7 bp, Unknown
  misc_feature (1)..( 7): Result.005 file - promoters50/4282320
ctgaagt

SEQ ID NO: 185948 - DNA, 7 bp, Unknown
  misc_feature (1)..( 7): Result.005 file - promoters50/4282320
ttgaagt

SEQ ID NO: 185949 - DNA, 7 bp, Unknown
  misc_feature (1)..( 7): Result.005 file - promoters50/4282320
ttgaaga

SEQ ID NO: 185950 - DNA, 10 bp, Unknown
  misc_feature (1)..( 10): Result.005 file - promoters50/4282324
aataaaaatc

SEQ ID NO: 185951 - DNA, 10 bp, Unknown
  misc_feature (1)..( 10): Result.005 file - promoters50/4282324
aattaaaatt

SEQ ID NO: 185952 - DNA, 10 bp, Unknown
  misc_feature (1)..( 10): Result.005 file - promoters50/4282324
aacaaaaatg

SEQ ID NO: 185953 - DNA, 10 bp, Unknown
  misc_feature (1)..( 10): Result.005 file - promoters50/4282324
gatttaaatt

SEQ ID NO: 185954 - DNA, 10 bp, Unknown
  misc_feature (1)..( 10): Result.005 file - promoters50/4282324
ctttttaatt

SEQ ID NO: 185955 - DNA, 10 bp, Unknown
  misc_feature (1)..( 10): Result.005 file - promoters50/4282324
ggttttaatc

SEQ ID NO: 185956 - DNA, 10 bp, Unknown
  misc_feature (1)..( 10): Result.005 file - promoters50/4282324
aattttaaga

SEQ ID NO: 185957 - DNA, 19 bp, Unknown
  misc_feature (1)..( 19): Result.005 file - promoters50/4282324
gttaggtaaactaaagaca

SEQ ID NO: 185958 - DNA, 19 bp, Unknown
  misc_feature (1)..( 19): Result.005 file - promoters50/4282324
aaaatttctactaaaggga

SEQ ID NO: 185959 - DNA, 19 bp, Unknown
  misc_feature (1)..( 19): Result.005 file - promoters50/4282324
agattttttaccaaacaaa

SEQ ID NO: 185960 - DNA, 19 bp, Unknown
  misc_feature (1)..( 19): Result.005 file - promoters50/4282324
tttttcttgactaaaccaa

SEQ ID NO: 185961 - DNA, 19 bp, Unknown
  misc_feature (1)..( 19): Result.005 file - promoters50/4282324
agatttgttagagagaaag

SEQ ID NO: 185962 - DNA, 19 bp, Unknown
  misc_feature (1)..( 19): Result.005 file - promoters50/4282324
taatttgtttgaataattc

SEQ ID NO: 185963 - DNA, 19 bp, Unknown
  misc_feature (1)..( 19): Result.005 file - promoters50/4282324
atatacacatccaatcaaa

SEQ ID NO: 185964 - DNA, 19 bp, Unknown
  misc_feature (1)..( 19): Result.005 file - promoters50/4282324
agaacgtgaactaaatcaa

SEQ ID NO: 185965 - DNA, 15 bp, Unknown
  misc_feature (1)..( 15): Result.005 file - promoters50/4282324
ttaattataacgaat

SEQ ID NO: 185966 - DNA, 15 bp, Unknown
  misc_feature (1)..( 15): Result.005 file - promoters50/4282324
ttaattctatgtatt

SEQ ID NO: 185967 - DNA, 15 bp, Unknown
  misc_feature (1)..( 15): Result.005 file - promoters50/4282324
ttagttatatgactt

SEQ ID NO: 185968 - DNA, 15 bp, Unknown
  misc_feature (1)..( 15): Result.005 file - promoters50/4282324
ctaattttaagaaga

SEQ ID NO: 185969 - DNA, 15 bp, Unknown
  misc_feature (1)..( 15): Result.005 file - promoters50/4282324
ttcatttgaagtttt

SEQ ID NO: 185970 - DNA, 15 bp, Unknown
  misc_feature (1)..( 15): Result.005 file - promoters50/4282324
ctattttttttgatt

SEQ ID NO: 185971 - DNA, 11 bp, Unknown
  misc_feature (1)..( 11): Result.005 file - promoters50/4282324
ttaattataac

SEQ ID NO: 185972 - DNA, 11 bp, Unknown
  misc_feature (1)..( 11): Result.005 file - promoters50/4282324
taaattataaa

SEQ ID NO: 185973 - DNA, 11 bp, Unknown
  misc_feature (1)..( 11): Result.005 file - promoters50/4282324
ttagttatatg

SEQ ID NO: 185974 - DNA, 11 bp, Unknown
  misc_feature (1)..( 11): Result.005 file - promoters50/4282324
ctaattttaag

SEQ ID NO: 185975 - DNA, 11 bp, Unknown
  misc_feature (1)..( 11): Result.005 file - promoters50/4282324
ttcatttgaag

SEQ ID NO: 185976 - DNA, 11 bp, Unknown
  misc_feature (1)..( 11): Result.005 file - promoters50/4282324
ttctttttaat

SEQ ID NO: 185977 - DNA, 7 bp, Unknown
  misc_feature (1)..( 7): Result.005 file - promoters50/4282327
ttaaaaa

SEQ ID NO: 185978 - DNA, 7 bp, Unknown
  misc_feature (1)..( 7): Result.005 file - promoters50/4282327
ttaaaac

SEQ ID NO: 185979 - DNA, 7 bp, Unknown
  misc_feature (1)..( 7): Result.005 file - promoters50/4282327
ctaaaac

SEQ ID NO: 185980 - DNA, 9 bp, Unknown
  misc_feature (1)..( 9): Result.005 file - promoters50/4282327
acaataagt

SEQ ID NO: 185981 - DNA, 9 bp, Unknown
  misc_feature (1)..( 9): Result.005 file - promoters50/4282327
ttaattagt

SEQ ID NO: 185982 - DNA, 9 bp, Unknown
  misc_feature (1)..( 9): Result.005 file - promoters50/4282327
ttaattagc

SEQ ID NO: 185983 - DNA, 8 bp, Unknown
  misc_feature (1)..( 8): Result.005 file - promoters50/4282327
gaaaagtg

SEQ ID NO: 185984 - DNA, 8 bp, Unknown
  misc_feature (1)..( 8): Result.005 file - promoters50/4282327
gaaaagaa

SEQ ID NO: 185985 - DNA, 8 bp, Unknown
  misc_feature (1)..( 8): Result.005 file - promoters50/4282327
caaaagaa

SEQ ID NO: 185986 - DNA, 9 bp, Unknown
  misc_feature (1)..( 9): Result.005 file - promoters50/4282327
cttaataac

SEQ ID NO: 185987 - DNA, 9 bp, Unknown
  misc_feature (1)..( 9): Result.005 file - promoters50/4282327
cttaattag

SEQ ID NO: 185988 - DNA, 9 bp, Unknown
  misc_feature (1)..( 9): Result.005 file - promoters50/4282327
attaattag

SEQ ID NO: 185989 - DNA, 12 bp, Unknown
  misc_feature (1)..( 12): Result.005 file - promoters50/4282329
atactagctgac

SEQ ID NO: 185990 - DNA, 12 bp, Unknown
  misc_feature (1)..( 12): Result.005 file - promoters50/4282329
aaccttgctgac

SEQ ID NO: 185991 - DNA, 12 bp, Unknown
  misc_feature (1)..( 12): Result.005 file - promoters50/4282329
aacctttctgaa

SEQ ID NO: 185992 - DNA, 7 bp, Unknown
  misc_feature (1)..( 7): Result.005 file - promoters50/4282406
aaaaaaa

SEQ ID NO: 185993 - DNA, 7 bp, Unknown
  misc_feature (1)..( 7): Result.005 file - promoters50/4282406
aaataaa

SEQ ID NO: 185994 - DNA, 7 bp, Unknown
  misc_feature (1)..( 7): Result.005 file - promoters50/4282406
aaacaat

SEQ ID NO: 185995 - DNA, 10 bp, Unknown
  misc_feature (1)..( 10): Result.005 file - promoters50/4282406
ataatgtaat

SEQ ID NO: 185996 - DNA, 10 bp, Unknown
  misc_feature (1)..( 10): Result.005 file - promoters50/4282406
ataatataat

SEQ ID NO: 185997 - DNA, 10 bp, Unknown
  misc_feature (1)..( 10): Result.005 file - promoters50/4282406
gtaaagtact

SEQ ID NO: 185998 - DNA, 13 bp, Unknown
  misc_feature (1)..( 13): Result.005 file - promoters50/4282406
caaaaacaatttt

SEQ ID NO: 185999 - DNA, 13 bp, Unknown
  misc_feature (1)..( 13): Result.005 file - promoters50/4282406
caaaatcaaatag

SEQ ID NO: 186000 - DNA, 13 bp, Unknown
  misc_feature (1)..( 13): Result.005 file - promoters50/4282406
aaaaaactatttt

SEQ ID NO: 186001 - DNA, 8 bp, Unknown
  misc_feature (1)..( 8): Result.005 file - promoters50/4282406
tctagact

SEQ ID NO: 186002 - DNA, 8 bp, Unknown
  misc_feature (1)..( 8): Result.005 file - promoters50/4282406
tctatact

SEQ ID NO: 186003 - DNA, 8 bp, Unknown
  misc_feature (1)..( 8): Result.005 file - promoters50/4282406
actaaact

SEQ ID NO: 186004 - DNA, 8 bp, Unknown
  misc_feature (1)..( 8): Result.005 file - promoters50/4282414
atttctac

SEQ ID NO: 186005 - DNA, 8 bp, Unknown
  misc_feature (1)..( 8): Result.005 file - promoters50/4282414
ttttctat

SEQ ID NO: 186006 - DNA, 8 bp, Unknown
  misc_feature (1)..( 8): Result.005 file - promoters50/4282414
atttctta

SEQ ID NO: 186007 - DNA, 8 bp, Unknown
  misc_feature (1)..( 8): Result.005 file - promoters50/4282414
ttttctaa

SEQ ID NO: 186008 - DNA, 8 bp, Unknown
  misc_feature (1)..( 8): Result.005 file - promoters50/4282414
ctttctag

SEQ ID NO: 186009 - DNA, 8 bp, Unknown
  misc_feature (1)..( 8): Result.005 file - promoters50/4282414
gattctat

SEQ ID NO: 186010 - DNA, 12 bp, Unknown
  misc_feature (1)..( 12): Result.005 file - promoters50/4282414
aaggcagtaact

SEQ ID NO: 186011 - DNA, 12 bp, Unknown
  misc_feature (1)..( 12): Result.005 file - promoters50/4282414
caagcattaacc

SEQ ID NO: 186012 - DNA, 12 bp, Unknown
  misc_feature (1)..( 12): Result.005 file - promoters50/4282414
caaacatgaacc

SEQ ID NO: 186013 - DNA, 12 bp, Unknown
  misc_feature (1)..( 12): Result.005 file - promoters50/4282414
ctaagatgaaca

SEQ ID NO: 186014 - DNA, 12 bp, Unknown
  misc_feature (1)..( 12): Result.005 file - promoters50/4282414
gttatttcaaac

SEQ ID NO: 186015 - DNA, 12 bp, Unknown
  misc_feature (1)..( 12): Result.005 file - promoters50/4282414
aatattttaaaa

SEQ ID NO: 186016 - DNA, 11 bp, Unknown
  misc_feature (1)..( 11): Result.005 file - promoters50/4282414
agatggttttg

SEQ ID NO: 186017 - DNA, 11 bp, Unknown
  misc_feature (1)..( 11): Result.005 file - promoters50/4282414
acaaagttttg

SEQ ID NO: 186018 - DNA, 11 bp, Unknown
  misc_feature (1)..( 11): Result.005 file - promoters50/4282414
ataaaatttta

SEQ ID NO: 186019 - DNA, 11 bp, Unknown
  misc_feature (1)..( 11): Result.005 file - promoters50/4282414
gtgaaatttat

SEQ ID NO: 186020 - DNA, 11 bp, Unknown
  misc_feature (1)..( 11): Result.005 file - promoters50/4282414
ataagattaaa

SEQ ID NO: 186021 - DNA, 11 bp, Unknown
  misc_feature (1)..( 11): Result.005 file - promoters50/4282414
tcccaatttac

SEQ ID NO: 186022 - DNA, 10 bp, Unknown
  misc_feature (1)..( 10): Result.005 file - promoters50/4282414
aaaataaact

SEQ ID NO: 186023 - DNA, 10 bp, Unknown
  misc_feature (1)..( 10): Result.005 file - promoters50/4282414
taaacaaaat

SEQ ID NO: 186024 - DNA, 10 bp, Unknown
  misc_feature (1)..( 10): Result.005 file - promoters50/4282414
taaaaaaaga

SEQ ID NO: 186025 - DNA, 10 bp, Unknown
  misc_feature (1)..( 10): Result.005 file - promoters50/4282414
taaaaagctc

SEQ ID NO: 186026 - DNA, 10 bp, Unknown
  misc_feature (1)..( 10): Result.005 file - promoters50/4282414
aaaacataat

SEQ ID NO: 186027 - DNA, 10 bp, Unknown
  misc_feature (1)..( 10): Result.005 file - promoters50/4282414
caaacaacaa

SEQ ID NO: 186028 - DNA, 16 bp, Unknown
  misc_feature (1)..( 16): Result.005 file - promoters50/4282418
caaatgaaaaataaaa

SEQ ID NO: 186029 - DNA, 16 bp, Unknown
  misc_feature (1)..( 16): Result.005 file - promoters50/4282418
caaaaataaaataaaa

SEQ ID NO: 186030 - DNA, 16 bp, Unknown
  misc_feature (1)..( 16): Result.005 file - promoters50/4282418
tcagtcaaaaattaaa

SEQ ID NO: 186031 - DNA, 16 bp, Unknown
  misc_feature (1)..( 16): Result.005 file - promoters50/4282418
ttggtttaatatatta

SEQ ID NO: 186032 - DNA, 16 bp, Unknown
  misc_feature (1)..( 16): Result.005 file - promoters50/4282418
aagatttaatataagt

SEQ ID NO: 186033 - DNA, 16 bp, Unknown
  misc_feature (1)..( 16): Result.005 file - promoters50/4282418
aagttttaaaacatta

SEQ ID NO: 186034 - DNA, 11 bp, Unknown
  misc_feature (1)..( 11): Result.005 file - promoters50/4282418
gaaaaataata

SEQ ID NO: 186035 - DNA, 11 bp, Unknown
  misc_feature (1)..( 11): Result.005 file - promoters50/4282418
aaaaactaaga

SEQ ID NO: 186036 - DNA, 11 bp, Unknown
  misc_feature (1)..( 11): Result.005 file - promoters50/4282418
gaaaaaattaa

SEQ ID NO: 186037 - DNA, 11 bp, Unknown
  misc_feature (1)..( 11): Result.005 file - promoters50/4282418
gaaaacaaaaa

SEQ ID NO: 186038 - DNA, 11 bp, Unknown
  misc_feature (1)..( 11): Result.005 file - promoters50/4282418
gaaaaataata

SEQ ID NO: 186039 - DNA, 11 bp, Unknown
  misc_feature (1)..( 11): Result.005 file - promoters50/4282418
taaagaaactt

SEQ ID NO: 186040 - DNA, 14 bp, Unknown
  misc_feature (1)..( 14): Result.005 file - promoters50/4282418
aaaataatatcatc

SEQ ID NO: 186041 - DNA, 14 bp, Unknown
  misc_feature (1)..( 14): Result.005 file - promoters50/4282418
ttattaaaatcaat

SEQ ID NO: 186042 - DNA, 14 bp, Unknown
  misc_feature (1)..( 14): Result.005 file - promoters50/4282418
aaactaatatcatt

SEQ ID NO: 186043 - DNA, 14 bp, Unknown
  misc_feature (1)..( 14): Result.005 file - promoters50/4282418
ttgaaaaaattaat

SEQ ID NO: 186044 - DNA, 14 bp, Unknown
  misc_feature (1)..( 14): Result.005 file - promoters50/4282418
caggaaaaatatcg

SEQ ID NO: 186045 - DNA, 14 bp, Unknown
  misc_feature (1)..( 14): Result.005 file - promoters50/4282418
taaagaaacttagt

SEQ ID NO: 186046 - DNA, 8 bp, Unknown
  misc_feature (1)..( 8): Result.005 file - promoters50/4282421
ttttcata

SEQ ID NO: 186047 - DNA, 8 bp, Unknown
  misc_feature (1)..( 8): Result.005 file - promoters50/4282421
ttttcatt

SEQ ID NO: 186048 - DNA, 8 bp, Unknown
  misc_feature (1)..( 8): Result.005 file - promoters50/4282421
gtttgatt

SEQ ID NO: 186049 - DNA, 6 bp, Unknown
  misc_feature (1)..( 6): Result.005 file - promoters50/4282421
atttgt

SEQ ID NO: 186050 - DNA, 6 bp, Unknown
  misc_feature (1)..( 6): Result.005 file - promoters50/4282421
atttgt

SEQ ID NO: 186051 - DNA, 6 bp, Unknown
  misc_feature (1)..( 6): Result.005 file - promoters50/4282421
atttgt

SEQ ID NO: 186052 - DNA, 8 bp, Unknown
  misc_feature (1)..( 8): Result.005 file - promoters50/4282425
ttaaatta

SEQ ID NO: 186053 - DNA, 8 bp, Unknown
  misc_feature (1)..( 8): Result.005 file - promoters50/4282425
ttacattt

SEQ ID NO: 186054 - DNA, 8 bp, Unknown
  misc_feature (1)..( 8): Result.005 file - promoters50/4282425
caaaatat

SEQ ID NO: 186055 - DNA, 7 bp, Unknown
  misc_feature (1)..( 7): Result.005 file - promoters50/4282425
attataa

SEQ ID NO: 186056 - DNA, 7 bp, Unknown
  misc_feature (1)..( 7): Result.005 file - promoters50/4282425
tttataa

SEQ ID NO: 186057 - DNA, 8 bp, Unknown
  misc_feature (1)..( 8): Result.005 file - promoters50/4282425
attaatag

SEQ ID NO: 186058 - DNA, 13 bp, Unknown
  misc_feature (1)..( 13): Result.005 file - promoters50/4282425
tcctagccaaaaa

SEQ ID NO: 186059 - DNA, 13 bp, Unknown
  misc_feature (1)..( 13): Result.005 file - promoters50/4282425
gtgacatcaaaaa

SEQ ID NO: 186060 - DNA, 13 bp, Unknown
  misc_feature (1)..( 13): Result.005 file - promoters50/4282425
gtgacatcgaaag

SEQ ID NO: 186061 - DNA, 9 bp, Unknown
  misc_feature (1)..( 9): Result.005 file - promoters50/4282425
atatataat

SEQ ID NO: 186062 - DNA, 9 bp, Unknown
  misc_feature (1)..( 9): Result.005 file - promoters50/4282425
atatttaaa

SEQ ID NO: 186063 - DNA, 9 bp, Unknown
  misc_feature (1)..( 9): Result.005 file - promoters50/4282425
ttatagaat

SEQ ID NO: 186064 - DNA, 8 bp, Unknown
  misc_feature (1)..( 8): Result.005 file - promoters50/4282425
tatgaatg

SEQ ID NO: 186065 - DNA, 8 bp, Unknown
  misc_feature (1)..( 8): Result.005 file - promoters50/4282425
tattaata

SEQ ID NO: 186066 - DNA, 8 bp, Unknown
  misc_feature (1)..( 8): Result.005 file - promoters50/4282425
catttata

SEQ ID NO: 186067 - DNA, 8 bp, Unknown
  misc_feature (1)..( 8): Result.005 file - promoters50/4282425
atataaat

SEQ ID NO: 186068 - DNA, 8 bp, Unknown
  misc_feature (1)..( 8): Result.005 file - promoters50/4282425
atataaaa

SEQ ID NO: 186069 - DNA, 8 bp, Unknown
  misc_feature (1)..( 8): Result.005 file - promoters50/4282425
taataaaa

SEQ ID NO: 186070 - DNA, 8 bp, Unknown
  misc_feature (1)..( 8): Result.005 file - promoters50/4282425
gtcactaa

SEQ ID NO: 186071 - DNA, 8 bp, Unknown
  misc_feature (1)..( 8): Result.005 file - promoters50/4282425
atcaataa

SEQ ID NO: 186072 - DNA, 8 bp, Unknown
  misc_feature (1)..( 8): Result.005 file - promoters50/4282425
atcaatgg

SEQ ID NO: 186073 - DNA, 8 bp, Unknown
  misc_feature (1)..( 8): Result.005 file - promoters50/4282428
attgatgt

SEQ ID NO: 186074 - DNA, 8 bp, Unknown
  misc_feature (1)..( 8): Result.005 file - promoters50/4282428
gttgctgt

SEQ ID NO: 186075 - DNA, 8 bp, Unknown
  misc_feature (1)..( 8): Result.005 file - promoters50/4282428
attgataa

SEQ ID NO: 186076 - DNA, 31 bp, Unknown; identical to SEQ ID NO: 72331
  misc_feature (1)..( 31): Result.005 file - promoters50/4282436

SEQ ID NO: 186077 - DNA, 31 bp, Unknown
  misc_feature (1)..( 31): Result.005 file - promoters50/4282436
cacgtgtcattttattattagctattgcttc

SEQ ID NO: 186078 - DNA, 31 bp, Unknown
  misc_feature (1)..( 31): Result.005 file - promoters50/4282436
tacgtgtcaagctttggttggttattgcttc

SEQ ID NO: 186079 - DNA, 15 bp, Unknown
  misc_feature (1)..( 15): Result.005 file - promoters50/4282436
cgccttagctttctc

SEQ ID NO: 186080 - DNA, 15 bp, Unknown
  misc_feature (1)..( 15): Result.005 file - promoters50/4282436
cgccttagctttctc

SEQ ID NO: 186081 - DNA, 15 bp, Unknown
  misc_feature (1)..( 15): Result.005 file - promoters50/4282436
cgccttagctttctc

SEQ ID NO: 186082 - DNA, 22 bp, Unknown
  misc_feature (1)..( 22): Result.005 file - promoters50/4282436
gaccgagtcgtcctcgtctttt

SEQ ID NO: 186083 - DNA, 22 bp, Unknown
  misc_feature (1)..( 22): Result.005 file - promoters50/4282436
gacctagtcgtcctcgtctttt

SEQ ID NO: 186084 - DNA, 22 bp, Unknown
  misc_feature (1)..( 22): Result.005 file - promoters50/4282436
gaccgactcgtcctcgtctttt

SEQ ID NO: 186085 - DNA, 19 bp, Unknown
  misc_feature (1)..( 19): Result.005 file - promoters50/4282436
ttttgcttctataaatcaa

SEQ ID NO: 186086 - DNA, 19 bp, Unknown
  misc_feature (1)..( 19): Result.005 file - promoters50/4282436
ttcttcttctataaaacaa

SEQ ID NO: 186087 - DNA, 19 bp, Unknown
  misc_feature (1)..( 19): Result.005 file - promoters50/4282436
ttcttcttctataaattaa

SEQ ID NO: 186088 - DNA, 13 bp, Unknown
  misc_feature (1)..( 13): Result.005 file - promoters50/4282477
atattgaacaaaa

SEQ ID NO: 186089 - DNA, 13 bp, Unknown
  misc_feature (1)..( 13): Result.005 file - promoters50/4282477
ttatttaacaaat

SEQ ID NO: 186090 - DNA, 13 bp, Unknown
  misc_feature (1)..( 13): Result.005 file - promoters50/4282477
acacaaaacaaaa

SEQ ID NO: 186091 - DNA, 13 bp, Unknown
  misc_feature (1)..( 13): Result.005 file - promoters50/4282477
ttatttattaatt

SEQ ID NO: 186092 - DNA, 10 bp, Unknown
  misc_feature (1)..( 10): Result.005 file - promoters50/4282477
taagatttga

SEQ ID NO: 186093 - DNA, 10 bp, Unknown
  misc_feature (1)..( 10): Result.005 file - promoters50/4282477
tttaatttga

SEQ ID NO: 186094 - DNA, 10 bp, Unknown
  misc_feature (1)..( 10): Result.005 file - promoters50/4282477
taaaatttga

SEQ ID NO: 186095 - DNA, 10 bp, Unknown
  misc_feature (1)..( 10): Result.005 file - promoters50/4282477
taacattcat

SEQ ID NO: 186096 - DNA, 10 bp, Unknown
  misc_feature (1)..( 10): Result.005 file - promoters50/4282477
ttaaatttgt

SEQ ID NO: 186097 - DNA, 9 bp, Unknown
  misc_feature (1)..( 9): Result.005 file - promoters50/4282477
ataaaattt

SEQ ID NO: 186098 - DNA, 9 bp, Unknown
  misc_feature (1)..( 9): Result.005 file - promoters50/4282477
ataaaatct

SEQ ID NO: 186099 - DNA, 9 bp, Unknown
  misc_feature (1)..( 9): Result.005 file - promoters50/4282477
aaaaaatta

SEQ ID NO: 186100 - DNA, 9 bp, Unknown
  misc_feature (1)..( 9): Result.005 file - promoters50/4282477
gataaatta

SEQ ID NO: 186101 - DNA, 11 bp, Unknown
  misc_feature (1)..( 11): Result.005 file - promoters50/4282477
gctaaatcgcg

SEQ ID NO: 186102 - DNA, 11 bp, Unknown
  misc_feature (1)..( 11): Result.005 file - promoters50/4282477
aataattcgaa

SEQ ID NO: 186103 - DNA, 11 bp, Unknown
  misc_feature (1)..( 11): Result.005 file - promoters50/4282477
aataatttgga

SEQ ID NO: 186104 - DNA, 11 bp, Unknown
  misc_feature (1)..( 11): Result.005 file - promoters50/4282477
aataaattatt

SEQ ID NO: 186105 - DNA, 10 bp, Unknown
  misc_feature (1)..( 10): Result.005 file - promoters50/4282477
cataaattta

SEQ ID NO: 186106 - DNA, 10 bp, Unknown
  misc_feature (1)..( 10): Result.005 file - promoters50/4282477
cattaatata

SEQ ID NO: 186107 - DNA, 10 bp, Unknown
  misc_feature (1)..( 10): Result.005 file - promoters50/4282477
cttaaatttg

SEQ ID NO: 186108 - DNA, 10 bp, Unknown
  misc_feature (1)..( 10): Result.005 file - promoters50/4282477
ttaaaatttg

SEQ ID NO: 186109 - DNA, 11 bp, Unknown
  misc_feature (1)..( 11): Result.005 file - promoters50/4282487
tcttttaattg

SEQ ID NO: 186110 - DNA, 11 bp, Unknown
  misc_feature (1)..( 11): Result.005 file - promoters50/4282487
gcttttgattt

SEQ ID NO: 186111 - DNA, 11 bp, Unknown
  misc_feature (1)..( 11): Result.005 file - promoters50/4282487
tgttttgtttt

SEQ ID NO: 186112 - DNA, 11 bp, Unknown
  misc_feature (1)..( 11): Result.005 file - promoters50/4282487
tatttcgatgt

SEQ ID NO: 186113 - DNA, 9 bp, Unknown
  misc_feature (1)..( 9): Result.005 file - promoters50/4282487
gtttagtta

SEQ ID NO: 186114 - DNA, 9 bp, Unknown
  misc_feature (1)..( 9): Result.005 file - promoters50/4282487
atttagttt

SEQ ID NO: 186115 - DNA, 9 bp, Unknown
  misc_feature (1)..( 9): Result.005 file - promoters50/4282487
ttttagtgg

SEQ ID NO: 186116 - DNA, 9 bp, Unknown
  misc_feature (1)..( 9): Result.005 file - promoters50/4282487
tcttatttt

SEQ ID NO: 186117 - DNA, 9 bp, Unknown
  misc_feature (1)..( 9): Result.005 file - promoters50/4282487
ttttagatt

SEQ ID NO: 186118 - DNA, 7 bp, Unknown
  misc_feature (1)..( 7): Result.005 file - promoters50/4282487
aatgttt

SEQ ID NO: 186119 - DNA, 7 bp, Unknown
  misc_feature (1)..( 7): Result.005 file - promoters50/4282487
aatgttt

SEQ ID NO: 186120 - DNA, 7 bp, Unknown
  misc_feature (1)..( 7): Result.005 file - promoters50/4282487
aatattt

SEQ ID NO: 186121 - DNA, 7 bp, Unknown
  misc_feature (1)..( 7): Result.005 file - promoters50/4282487
aatatta

SEQ ID NO: 186122 - DNA, 13 bp, Unknown
  misc_feature (1)..( 13): Result.005 file - promoters50/4282487
aggttaattacgt

SEQ ID NO: 186123 - DNA, 13 bp, Unknown
  misc_feature (1)..( 13): Result.005 file - promoters50/4282487
tagttaatgtttt

SEQ ID NO: 186124 - DNA, 13 bp, Unknown
  misc_feature (1)..( 13): Result.005 file - promoters50/4282487
ctattaatatttt

SEQ ID NO: 186125 - DNA, 13 bp, Unknown
  misc_feature (1)..( 13): Result.005 file - promoters50/4282487
tagctaaacatct

SEQ ID NO: 186126 - DNA, 13 bp, Unknown
  misc_feature (1)..( 13): Result.005 file - promoters50/4282487
atattaatgggcc

SEQ ID NO: 186127 - DNA, 10 bp, Unknown
  misc_feature (1)..( 10): Result.005 file - promoters50/4282487
ttttgatttg

SEQ ID NO: 186128 - DNA, 10 bp, Unknown
  misc_feature (1)..( 10): Result.005 file - promoters50/4282487
tttcgatgta

SEQ ID NO: 186129 - DNA, 10 bp, Unknown
  misc_feature (1)..( 10): Result.005 file - promoters50/4282487
ctttgctttg

SEQ ID NO: 186130 - DNA, 10 bp, Unknown
  misc_feature (1)..( 10): Result.005 file - promoters50/4282487
ttttgatttg

SEQ ID NO: 186131 - DNA, 12 bp, Unknown
  misc_feature (1)..( 12): Result.005 file - promoters50/4282487
aacttttaagta

SEQ ID NO: 186132 - DNA, 12 bp, Unknown
  misc_feature (1)..( 12): Result.005 file - promoters50/4282487
ttattttcagta

SEQ ID NO: 186133 - DNA, 12 bp, Unknown
  misc_feature (1)..( 12): Result.005 file - promoters50/4282487
aacctttatgta

SEQ ID NO: 186134 - DNA, 12 bp, Unknown
  misc_feature (1)..( 12): Result.005 file - promoters50/4282487
cgggtttatgtt

SEQ ID NO: 186135 - DNA, 10 bp, Unknown
  misc_feature (1)..( 10): Result.005 file - promoters50/4282503
tttgaatgcc

SEQ ID NO: 186136 - DNA, 10 bp, Unknown
  misc_feature (1)..( 10): Result.005 file - promoters50/4282503
ttttaataac

SEQ ID NO: 186137 - DNA, 10 bp, Unknown
  misc_feature (1)..( 10): Result.005 file - promoters50/4282503
ttttactaac

SEQ ID NO: 186138 - DNA, 11 bp, Unknown
  misc_feature (1)..( 11): Result.005 file - promoters50/4282503
ccaattatatg

SEQ ID NO: 186139 - DNA, 11 bp, Unknown
  misc_feature (1)..( 11): Result.005 file - promoters50/4282503
tttattaaatg

SEQ ID NO: 186140 - DNA, 11 bp, Unknown
  misc_feature (1)..( 11): Result.005 file - promoters50/4282503
tttactaactt

SEQ ID NO: 186141 - DNA, 7 bp, Unknown
  misc_feature (1)..( 7): Result.005 file - promoters50/4282503
taaaatt

SEQ ID NO: 186142 - DNA, 7 bp, Unknown
  misc_feature (1)..( 7): Result.005 file - promoters50/4282503
taaaatc

SEQ ID NO: 186143 - DNA, 7 bp, Unknown
  misc_feature (1)..( 7): Result.005 file - promoters50/4282503
caaaatc

SEQ ID NO: 186144 - DNA, 10 bp, Unknown
  misc_feature (1)..( 10): Result.005 file - promoters50/4282506
caataaactt

SEQ ID NO: 186145 - DNA, 10 bp, Unknown
  misc_feature (1)..( 10): Result.005 file - promoters50/4282506
caataaccaa

SEQ ID NO: 186146 - DNA, 10 bp, Unknown
  misc_feature (1)..( 10): Result.005 file - promoters50/4282506
aaattaccaa

SEQ ID NO: 186147 - DNA, 10 bp, Unknown
  misc_feature (1)..( 10): Result.005 file - promoters50/4282510
aataaatttt

SEQ ID NO: 186148 - DNA, 10 bp, Unknown
  misc_feature (1)..( 10): Result.005 file - promoters50/4282510
aataaattaa

SEQ ID NO: 186149 - DNA, 10 bp, Unknown
  misc_feature (1)..( 10): Result.005 file - promoters50/4282510
cctaatttaa

SEQ ID NO: 186150 - DNA, 7 bp, Unknown
  misc_feature (1)..( 7): Result.005 file - promoters50/4282510
aaaaacg

SEQ ID NO: 186151 - DNA, 7 bp, Unknown
  misc_feature (1)..( 7): Result.005 file - promoters50/4282510
aaaaaca

SEQ ID NO: 186152 - DNA, 7 bp, Unknown
  misc_feature (1)..( 7): Result.005 file - promoters50/4282510
taaaaca

SEQ ID NO: 186153 - DNA, 11 bp, Unknown
  misc_feature (1)..( 11): Result.005 file - promoters50/4282560
tatgaacaaat

SEQ ID NO: 186154 - DNA, 11 bp, Unknown
  misc_feature (1)..( 11): Result.005 file - promoters50/4282560
agggtacaaat

SEQ ID NO: 186155 - DNA, 11 bp, Unknown
  misc_feature (1)..( 11): Result.005 file - promoters50/4282560
tataaactaat

SEQ ID NO: 186156 - DNA, 11 bp, Unknown
  misc_feature (1)..( 11): Result.005 file - promoters50/4282560
actgtaaaaaa

SEQ ID NO: 186157 - DNA, 9 bp, Unknown
  misc_feature (1)..( 9): Result.005 file - promoters50/4282560
atttcttac

SEQ ID NO: 186158 - DNA, 9 bp, Unknown
  misc_feature (1)..( 9): Result.005 file - promoters50/4282560
atttctaca

SEQ ID NO: 186159 - DNA, 9 bp, Unknown
  misc_feature (1)..( 9): Result.005 file - promoters50/4282560
ttttcgtac

SEQ ID NO: 186160 - DNA, 9 bp, Unknown
  misc_feature (1)..( 9): Result.005 file - promoters50/4282560
attcctttg

SEQ ID NO: 186161 - DNA, 9 bp, Unknown
  misc_feature (1)..( 9): Result.005 file - promoters50/4282560
cttacaaaa

SEQ ID NO: 186162 - DNA, 9 bp, Unknown
  misc_feature (1)..( 9): Result.005 file - promoters50/4282560
tctacaaaa

SEQ ID NO: 186163 - DNA, 9 bp, Unknown
  misc_feature (1)..( 9): Result.005 file - promoters50/4282560
tttacaacc

SEQ ID NO: 186164 - DNA, 9 bp, Unknown
  misc_feature (1)..( 9): Result.005 file - promoters50/4282560
tttgcaaat

SEQ ID NO: 186165 - DNA, 9 bp, Unknown
  misc_feature (1)..( 9): Result.005 file - promoters50/4282560
agcttatta

SEQ ID NO: 186166 - DNA, 9 bp, Unknown
  misc_feature (1)..( 9): Result.005 file - promoters50/4282560
agcttttta

SEQ ID NO: 186167 - DNA, 9 bp, Unknown
  misc_feature (1)..( 9): Result.005 file - promoters50/4282560
tatttatta

SEQ ID NO: 186168 - DNA, 9 bp, Unknown
  misc_feature (1)..( 9): Result.005 file - promoters50/4282560
ggtttatta

SEQ ID NO: 186169 - DNA, 12 bp, Unknown
  misc_feature (1)..( 12): Result.005 file - promoters50/4282560
aacaaatttgac

SEQ ID NO: 186170 - DNA, 12 bp, Unknown
  misc_feature (1)..( 12): Result.005 file - promoters50/4282560
agtatatttgaa

SEQ ID NO: 186171 - DNA, 12 bp, Unknown
  misc_feature (1)..( 12): Result.005 file - promoters50/4282560
agtaaatttgac

SEQ ID NO: 186172 - DNA, 12 bp, Unknown
  misc_feature (1)..( 12): Result.005 file - promoters50/4282560
agtaactttaga

SEQ ID NO: 186173 - DNA, 9 bp, Unknown
  misc_feature (1)..( 9): Result.005 file - promoters50/4282580
ccacaaaaa

SEQ ID NO: 186174 - DNA, 9 bp, Unknown
  misc_feature (1)..( 9): Result.005 file - promoters50/4282580
agacagaaa

SEQ ID NO: 186175 - DNA, 9 bp, Unknown
  misc_feature (1)..( 9): Result.005 file - promoters50/4282580
aaacaatta

SEQ ID NO: 186176 - DNA, 9 bp, Unknown
  misc_feature (1)..( 9): Result.005 file - promoters50/4282580
acacagaat

SEQ ID NO: 186177 - DNA, 9 bp, Unknown
  misc_feature (1)..( 9): Result.005 file - promoters50/4282580
aaacgattc

SEQ ID NO: 186178 - DNA, 9 bp, Unknown
  misc_feature (1)..( 9): Result.005 file - promoters50/4282580
atacgcttc

SEQ ID NO: 186179 - DNA, 11 bp, Unknown
  misc_feature (1)..( 11): Result.005 file - promoters50/4282580
ctgattttgta

SEQ ID NO: 186180 - DNA, 11 bp, Unknown
  misc_feature (1)..( 11): Result.005 file - promoters50/4282580
tcaattttgct

SEQ ID NO: 186181 - DNA, 11 bp, Unknown
  misc_feature (1)..( 11): Result.005 file - promoters50/4282580
ttgattttgat

SEQ ID NO: 186182 - DNA, 11 bp, Unknown
  misc_feature (1)..( 11): Result.005 file - promoters50/4282580
ccaattttgat

SEQ ID NO: 186183 - DNA, 11 bp, Unknown
  misc_feature (1)..( 11): Result.005 file - promoters50/4282580
atcattttttt

SEQ ID NO: 186184 - DNA, 11 bp, Unknown
  misc_feature (1)..( 11): Result.005 file - promoters50/4282580
ataatttattt

SEQ ID NO: 186185 - DNA, 18 bp, Unknown
  misc_feature (1)..( 18): Result.005 file - promoters50/4282580
ccgactatcatttttttc

SEQ ID NO: 186186 - DNA, 18 bp, Unknown
  misc_feature (1)..( 18): Result.005 file - promoters50/4282580
attagtatgattaagctt

SEQ ID NO: 186187 - DNA, 19 bp, Unknown
  misc_feature (1)..( 19): Result.005 file - promoters50/4282580
agagacatcaattttgcta

SEQ ID NO: 186188 - DNA, 19 bp, Unknown
  misc_feature (1)..( 19): Result.005 file - promoters50/4282580
agtctgatggataacttga

SEQ ID NO: 186189 - DNA, 19 bp, Unknown
  misc_feature (1)..( 19): Result.005 file - promoters50/4282580
agaattactaattttaata

SEQ ID NO: 186190 - DNA, 19 bp, Unknown
  misc_feature (1)..( 19): Result.005 file - promoters50/4282580
tttgatgacaattttgtag

SEQ ID NO: 186191 - DNA, 19 bp, Unknown
  misc_feature (1)..( 19): Result.005 file - promoters50/4282580
tgatgagagtgttttttag

SEQ ID NO: 186192 - DNA, 8 bp, Unknown
  misc_feature (1)..( 8): Result.005 file - promoters50/4282588
tttgaact

SEQ ID NO: 186193 - DNA, 8 bp, Unknown
  misc_feature (1)..( 8): Result.005 file - promoters50/4282588
tttaaact

SEQ ID NO: 186194 - DNA, 8 bp, Unknown
  misc_feature (1)..( 8): Result.005 file - promoters50/4282588
tttaaaaa

SEQ ID NO: 186195 - DNA, 7 bp, Unknown
  misc_feature (1)..( 7): Result.005 file - promoters50/4282588
cataata

SEQ ID NO: 186196 - DNA, 7 bp, Unknown
  misc_feature (1)..( 7): Result.005 file - promoters50/4282588
aataata

SEQ ID NO: 186197 - DNA, 7 bp, Unknown
  misc_feature (1)..( 7): Result.005 file - promoters50/4282588
aataatg

SEQ ID NO: 186198 - DNA, 11 bp, Unknown
  misc_feature (1)..( 11): Result.005 file - promoters50/4282588
caataataaag

SEQ ID NO: 186199 - DNA, 11 bp, Unknown
  misc_feature (1)..( 11): Result.005 file - promoters50/4282588
aaataataaag

SEQ ID NO: 186200 - DNA, 11 bp, Unknown
  misc_feature (1)..( 11): Result.005 file - promoters50/4282588
caataaaccaa

SEQ ID NO: 186201 - DNA, 11 bp, Unknown
  misc_feature (1)..( 11): Result.005 file - promoters50/4282588
aaaaaatataa

SEQ ID NO: 186202 - DNA, 11 bp, Unknown
  misc_feature (1)..( 11): Result.005 file - promoters50/4282588
aaaaaatatta

SEQ ID NO: 186203 - DNA, 11 bp, Unknown
  misc_feature (1)..( 11): Result.005 file - promoters50/4282588
gaaaaatcgag

SEQ ID NO: 186204 - DNA, 11 bp, Unknown
  misc_feature (1)..( 11): Result.005 file - promoters50/4282588
aagaaatataa

SEQ ID NO: 186205 - DNA, 9 bp, Unknown
  misc_feature (1)..( 9): Result.005 file - promoters50/4282588
ttgattttt

SEQ ID NO: 186206 - DNA, 9 bp, Unknown
  misc_feature (1)..( 9): Result.005 file - promoters50/4282588
ttgattttt

SEQ ID NO: 186207 - DNA, 10 bp, Unknown
  misc_feature (1)..( 10): Result.005 file - promoters50/4282588
aagatatttt

SEQ ID NO: 186208 - DNA, 9 bp, Unknown
  misc_feature (1)..( 9): Result.005 file - promoters50/4282588
ctatatata

SEQ ID NO: 186209 - DNA, 9 bp, Unknown
  misc_feature (1)..( 9): Result.005 file - promoters50/4282588
ctatataaa

SEQ ID NO: 186210 - DNA, 9 bp, Unknown
  misc_feature (1)..( 9): Result.005 file - promoters50/4282588
ctataaata

SEQ ID NO: 186211 - DNA, 11 bp, Unknown
  misc_feature (1)..( 11): Result.005 file - promoters50/4282588
gaaatatctaa

SEQ ID NO: 186212 - DNA, 11 bp, Unknown
  misc_feature (1)..( 11): Result.005 file - promoters50/4282588
gaaaaatctag

SEQ ID NO: 186213 - DNA, 11 bp, Unknown
  misc_feature (1)..( 11): Result.005 file - promoters50/4282588
ccaatatataa

SEQ ID NO: 186214 - DNA, 9 bp, Unknown
  misc_feature (1)..( 9): Result.005 file - promoters50/4282588
ttatttaac

SEQ ID NO: 186215 - DNA, 9 bp, Unknown
  misc_feature (1)..( 9): Result.005 file - promoters50/4282588
ttatttttt

SEQ ID NO: 186216 - DNA, 9 bp, Unknown
  misc_feature (1)..( 9): Result.005 file - promoters50/4282588
atatttttt

SEQ ID NO: 186217 - DNA, 7 bp, Unknown
  misc_feature (1)..( 7): Result.005 file - promoters50/4282588
tttgtaa

SEQ ID NO: 186218 - DNA, 7 bp, Unknown
  misc_feature (1)..( 7): Result.005 file - promoters50/4282588
tttttaa

SEQ ID NO: 186219 - DNA, 7 bp, Unknown
  misc_feature (1)..( 7): Result.005 file - promoters50/4282588
tttttat

SEQ ID NO: 186220 - DNA, 8 bp, Unknown
  misc_feature (1)..( 8): Result.005 file - promoters50/4282588
ataaaaac

SEQ ID NO: 186221 - DNA, 8 bp, Unknown
  misc_feature (1)..( 8): Result.005 file - promoters50/4282588
agaaaaac

SEQ ID NO: 186222 - DNA, 8 bp, Unknown
  misc_feature (1)..( 8): Result.005 file - promoters50/4282588
agaaaaaa

SEQ ID NO: 186223 - DNA, 10 bp, Unknown
  misc_feature (1)..( 10): Result.005 file - promoters50/4282588
ttcaaataaa

SEQ ID NO: 186224 - DNA, 10 bp, Unknown
  misc_feature (1)..( 10): Result.005 file - promoters50/4282588
aataaaaaaa

SEQ ID NO: 186225 - DNA, 10 bp, Unknown
  misc_feature (1)..( 10): Result.005 file - promoters50/4282588
ttcaaatatt

SEQ ID NO: 186226 - DNA, 8 bp, Unknown
  misc_feature (1)..( 8): Result.005 file - promoters50/4282588
atttaaaa

SEQ ID NO: 186227 - DNA, 8 bp, Unknown
  misc_feature (1)..( 8): Result.005 file - promoters50/4282588
ttttaaaa

SEQ ID NO: 186228 - DNA, 8 bp, Unknown
  misc_feature (1)..( 8): Result.005 file - promoters50/4282588
ttttaatc

SEQ ID NO: 186229 - DNA, 9 bp, Unknown
  misc_feature (1)..( 9): Result.005 file - promoters50/4282588
attatcaat

SEQ ID NO: 186230 - DNA, 9 bp, Unknown
  misc_feature (1)..( 9): Result.005 file - promoters50/4282588
attgtcaaa

SEQ ID NO: 186231 - DNA, 9 bp, Unknown
  misc_feature (1)..( 9): Result.005 file - promoters50/4282588
tttgtaaaa

SEQ ID NO: 186232 - DNA, 7 bp, Unknown
  misc_feature (1)..( 7): Result.005 file - promoters50/4282588
aaaaatt

SEQ ID NO: 186233 - DNA, 7 bp, Unknown
  misc_feature (1)..( 7): Result.005 file - promoters50/4282588
aaaaatc

SEQ ID NO: 186234 - DNA, 7 bp, Unknown
  misc_feature (1)..( 7): Result.005 file - promoters50/4282588
aaacatc

SEQ ID NO: 186235 - DNA, 10 bp, Unknown
  misc_feature (1)..( 10): Result.005 file - promoters50/4282611
tgttgcttca

SEQ ID NO: 186236 - DNA, 10 bp, Unknown
  misc_feature (1)..( 10): Result.005 file - promoters50/4282611
ttttggttct

SEQ ID NO: 186237 - DNA, 10 bp, Unknown
  misc_feature (1)..( 10): Result.005 file - promoters50/4282611
tttttgtttt

SEQ ID NO: 186238 - DNA, 10 bp, Unknown
  misc_feature (1)..( 10): Result.005 file - promoters50/4282611
ccatggctct

SEQ ID NO: 186239 - DNA, 14 bp, Unknown
  misc_feature (1)..( 14): Result.005 file - promoters50/4282614
ccgttaatttcatt

SEQ ID NO: 186240 - DNA, 14 bp, Unknown
  misc_feature (1)..( 14): Result.005 file - promoters50/4282614
gatataatctcatg

SEQ ID NO: 186241 - DNA, 14 bp, Unknown
  misc_feature (1)..( 14): Result.005 file - promoters50/4282614
aatcaaatttcatc

SEQ ID NO: 186242 - DNA, 14 bp, Unknown
  misc_feature (1)..( 14): Result.005 file - promoters50/4282614
catataatttattt

SEQ ID NO: 186243 - DNA, 14 bp, Unknown
  misc_feature (1)..( 14): Result.005 file - promoters50/4282614
gaaataattttcaa

SEQ ID NO: 186244 - DNA, 14 bp, Unknown
  misc_feature (1)..( 14): Result.005 file - promoters50/4282614
gttgtaatgattag

SEQ ID NO: 186245 - DNA, 14 bp, Unknown
  misc_feature (1)..( 14): Result.005 file - promoters50/4282614
cacgtgctgtcatg

SEQ ID NO: 186246 - DNA, 14 bp, Unknown
  misc_feature (1)..( 14): Result.005 file - promoters50/4282614
ctaagaaacatctc

SEQ ID NO: 186247 - DNA, 14 bp, Unknown
  misc_feature (1)..( 14): Result.005 file - promoters50/4282614
ttaataaatttatt

SEQ ID NO: 186248 - DNA, 14 bp, Unknown
  misc_feature (1)..( 14): Result.005 file - promoters50/4282614
ctaattaattttag

SEQ ID NO: 186249 - DNA, 14 bp, Unknown
  misc_feature (1)..( 14): Result.005 file - promoters50/4282614
gtgataaataccaa

SEQ ID NO: 186250 - DNA, 14 bp, Unknown
  misc_feature (1)..( 14): Result.005 file - promoters50/4282614
gagatttattcatc

SEQ ID NO: 186251 - DNA, 14 bp, Unknown
  misc_feature (1)..( 14): Result.005 file - promoters50/4282614
cttgttaatgttag

SEQ ID NO: 186252 - DNA, 14 bp, Unknown
  misc_feature (1)..( 14): Result.005 file - promoters50/4282614
gtgacaaaacattt

SEQ ID NO: 186253 - DNA, 14 bp, Unknown
  misc_feature (1)..( 14): Result.005 file - promoters50/4282614
ttgaaaaacagtat

SEQ ID NO: 186254 - DNA, 14 bp, Unknown
  misc_feature (1)..( 14): Result.005 file - promoters50/4282614
gaaatatctcacgc

SEQ ID NO: 186255 - DNA, 14 bp, Unknown
  misc_feature (1)..( 14): Result.005 file - promoters50/4282614
gaaatatttttaag

SEQ ID NO: 186256 - DNA, 14 bp, Unknown
  misc_feature (1)..( 14): Result.005 file - promoters50/4282614
agaatttcttcttc

SEQ ID NO: 186257 - DNA, 14 bp, Unknown
  misc_feature (1)..( 14): Result.005 file - promoters50/4282614
aaaatatccaatag

SEQ ID NO: 186258 - DNA, 14 bp, Unknown
  misc_feature (1)..( 14): Result.005 file - promoters50/4282614
gaattattttacaa

SEQ ID NO: 186259 - DNA, 14 bp, Unknown
  misc_feature (1)..( 14): Result.005 file - promoters50/4282614
attttatttgaaca

SEQ ID NO: 186260 - DNA, 14 bp, Unknown
  misc_feature (1)..( 14): Result.005 file - promoters50/4282614
attttattttattt

SEQ ID NO: 186261 - DNA, 14 bp, Unknown
  misc_feature (1)..( 14): Result.005 file - promoters50/4282614
aaagtatttttgat

SEQ ID NO: 186262 - DNA, 17 bp, Unknown
  misc_feature (1)..( 17): Result.005 file - promoters50/4282614
agtttaattctattttg

SEQ ID NO: 186263 - DNA, 17 bp, Unknown
  misc_feature (1)..( 17): Result.005 file - promoters50/4282614
ttttttattttatttga

SEQ ID NO: 186264 - DNA, 17 bp, Unknown
  misc_feature (1)..( 17): Result.005 file - promoters50/4282614
agtataagatgttttgg

SEQ ID NO: 186265 - DNA, 17 bp, Unknown
  misc_feature (1)..( 17): Result.005 file - promoters50/4282614
tattttattttatttct

SEQ ID NO: 186266 - DNA, 17 bp, Unknown
  misc_feature (1)..( 17): Result.005 file - promoters50/4282614
aaaagtatttttgatca

SEQ ID NO: 186267 - DNA, 17 bp, Unknown
  misc_feature (1)..( 17): Result.005 file - promoters50/4282614
ccacacattttacatgt

SEQ ID NO: 186268 - DNA, 18 bp, Unknown
  misc_feature (1)..( 18): Result.005 file - promoters50/4282614
tataatatgtttgaccat

SEQ ID NO: 186269 - DNA, 7 bp, Unknown
  misc_feature (1)..( 7): Result.005 file - promoters50/4282626
aaatttg

SEQ ID NO: 186270 - DNA, 7 bp, Unknown
  misc_feature (1)..( 7): Result.005 file - promoters50/4282626
taatttg

SEQ ID NO: 186271 - DNA, 7 bp, Unknown
  misc_feature (1)..( 7): Result.005 file - promoters50/4282626
atatttt

SEQ ID NO: 186272 - DNA, 7 bp, Unknown
  misc_feature (1)..( 7): Result.005 file - promoters50/4282626
atacatt

SEQ ID NO: 186273 - DNA, 7 bp, Unknown
  misc_feature (1)..( 7): Result.005 file - promoters50/4282626
ataaatt

SEQ ID NO: 186274 - DNA, 7 bp, Unknown
  misc_feature (1)..( 7): Result.005 file - promoters50/4282626
atatatt

SEQ ID NO: 186275 - DNA, 8 bp, Unknown
  misc_feature (1)..( 8): Result.005 file - promoters50/4282637
tttgagag

SEQ ID NO: 186276 - DNA, 8 bp, Unknown
  misc_feature (1)..( 8): Result.005 file - promoters50/4282637
tttgagaa

SEQ ID NO: 186277 - DNA, 8 bp, Unknown
  misc_feature (1)..( 8): Result.005 file - promoters50/4282637
actgagag

SEQ ID NO: 186278 - DNA, 9 bp, Unknown
  misc_feature (1)..( 9): Result.005 file - promoters50/4282647
tataaataa

SEQ ID NO: 186279 - DNA, 9 bp, Unknown
  misc_feature (1)..( 9): Result.005 file - promoters50/4282647
tatatataa

SEQ ID NO: 186280 - DNA, 9 bp, Unknown
  misc_feature (1)..( 9): Result.005 file - promoters50/4282647
tatataata

SEQ ID NO: 186281 - DNA, 9 bp, Unknown
  misc_feature (1)..( 9): Result.005 file - promoters50/4282647
tatataaac

SEQ ID NO: 186282 - DNA, 11 bp, Unknown
  misc_feature (1)..( 11): Result.005 file - promoters50/4282647
taaaaataaaa

SEQ ID NO: 186283 - DNA, 11 bp, Unknown
  misc_feature (1)..( 11): Result.005 file - promoters50/4282647
aagcaattaaa

SEQ ID NO: 186284 - DNA, 11 bp, Unknown
  misc_feature (1)..( 11): Result.005 file - promoters50/4282647
aaggaatcaaa

SEQ ID NO: 186285 - DNA, 11 bp, Unknown
  misc_feature (1)..( 11): Result.005 file - promoters50/4282647
tgtgaattaat

SEQ ID NO: 186286 - DNA, 8 bp, Unknown
  misc_feature (1)..( 8): Result.005 file - promoters50/4282647
aatataat

SEQ ID NO: 186287 - DNA, 8 bp, Unknown
  misc_feature (1)..( 8): Result.005 file - promoters50/4282647
tatataat

SEQ ID NO: 186288 - DNA, 8 bp, Unknown
  misc_feature (1)..( 8): Result.005 file - promoters50/4282647
tatataaa

SEQ ID NO: 186289 - DNA, 8 bp, Unknown
  misc_feature (1)..( 8): Result.005 file - promoters50/4282647
tatatata

SEQ ID NO: 186290 - DNA, 10 bp, Unknown
  misc_feature (1)..( 10): Result.005 file - promoters50/4282651
agatggaaac

SEQ ID NO: 186291 - DNA, 10 bp, Unknown
  misc_feature (1)..( 10): Result.005 file - promoters50/4282651
aaatgaaaag

SEQ ID NO: 186292 - DNA, 10 bp, Unknown
  misc_feature (1)..( 10): Result.005 file - promoters50/4282651
aaatggaatc

SEQ ID NO: 186293 - DNA, 10 bp, Unknown
  misc_feature (1)..( 10): Result.005 file - promoters50/4282651
aaataaaaac

SEQ ID NO: 186294 - DNA, 10 bp, Unknown
  misc_feature (1)..( 10): Result.005 file - promoters50/4282651
acatacaaac

SEQ ID NO: 186295 - DNA, 10 bp, Unknown
  misc_feature (1)..( 10): Result.005 file - promoters50/4282651
atcagaaaag

SEQ ID NO: 186296 - DNA, 11 bp, Unknown
  misc_feature (1)..( 11): Result.005 file - promoters50/4282667
tttatttatac

SEQ ID NO: 186297 - DNA, 11 bp, Unknown
  misc_feature (1)..( 11): Result.005 file - promoters50/4282667
attattttgta

SEQ ID NO: 186298 - DNA, 11 bp, Unknown
  misc_feature (1)..( 11): Result.005 file - promoters50/4282667
tttgtttacgt

SEQ ID NO: 186299 - DNA, 11 bp, Unknown
  misc_feature (1)..( 11): Result.005 file - promoters50/4282667
tttatttatta

SEQ ID NO: 186300 - DNA, 11 bp, Unknown
  misc_feature (1)..( 11): Result.005 file - promoters50/4282667
aatattttcga

SEQ ID NO: 186301 - DNA, 11 bp, Unknown
  misc_feature (1)..( 11): Result.005 file - promoters50/4282667
catattgatta

SEQ ID NO: 186302 - DNA, 12 bp, Unknown
  misc_feature (1)..( 12): Result.005 file - promoters50/4282681
tttaatatattt

SEQ ID NO: 186303 - DNA, 12 bp, Unknown
  misc_feature (1)..( 12): Result.005 file - promoters50/4282681
atgtttattttt

SEQ ID NO: 186304 - DNA, 12 bp, Unknown
  misc_feature (1)..( 12): Result.005 file - promoters50/4282681
tttgatatataa

SEQ ID NO: 186305 - DNA, 14 bp, Unknown
  misc_feature (1)..( 14): Result.005 file - promoters50/4282681
ttaaaatattaaaa

SEQ ID NO: 186306 - DNA, 14 bp, Unknown
  misc_feature (1)..( 14): Result.005 file - promoters50/4282681
ttaaaatctcacac

SEQ ID NO: 186307 - DNA, 14 bp, Unknown
  misc_feature (1)..( 14): Result.005 file - promoters50/4282681
acaaaatactaaaa

SEQ ID NO: 186308 - DNA, 7 bp, Unknown
  misc_feature (1)..( 7): Result.005 file - promoters50/4282681
gtaaatg

SEQ ID NO: 186309 - DNA, 7 bp, Unknown
  misc_feature (1)..( 7): Result.005 file - promoters50/4282681
ataaatg

SEQ ID NO: 186310 - DNA, 7 bp, Unknown
  misc_feature (1)..( 7): Result.005 file - promoters50/4282681
ataaata

SEQ ID NO: 186311 - DNA, 7 bp, Unknown
  misc_feature (1)..( 7): Result.005 file - promoters50/4282681
aaaaaaa

SEQ ID NO: 186312 - DNA, 7 bp, Unknown
  misc_feature (1)..( 7): Result.005 file - promoters50/4282681
aaaaaat

SEQ ID NO: 186313 - DNA, 7 bp, Unknown
  misc_feature (1)..( 7): Result.005 file - promoters50/4282681
aaaaaaa

SEQ ID NO: 186314 - DNA, 9 bp, Unknown
  misc_feature (1)..( 9): Result.005 file - promoters50/4282681
attttatct

SEQ ID NO: 186315 - DNA, 9 bp, Unknown
  misc_feature (1)..( 9): Result.005 file - promoters50/4282681
attttaaaa

SEQ ID NO: 186316 - DNA, 9 bp, Unknown
  misc_feature (1)..( 9): Result.005 file - promoters50/4282681
tttttaaaa

SEQ ID NO: 186317 - DNA, 7 bp, Unknown
  misc_feature (1)..( 7): Result.005 file - promoters50/4282681
tctcata

SEQ ID NO: 186318 - DNA, 7 bp, Unknown
  misc_feature (1)..( 7): Result.005 file - promoters50/4282681
tcttata

SEQ ID NO: 186319 - DNA, 7 bp, Unknown
  misc_feature (1)..( 7): Result.005 file - promoters50/4282681
ccttata

SEQ ID NO: 186320 - DNA, 14 bp, Unknown
  misc_feature (1)..( 14): Result.005 file - promoters50/4282695
gtgaatcaatgttt

SEQ ID NO: 186321 - DNA, 14 bp, Unknown
  misc_feature (1)..( 14): Result.005 file - promoters50/4282695
tataattaatgtca

SEQ ID NO: 186322 - DNA, 14 bp, Unknown
  misc_feature (1)..( 14): Result.005 file - promoters50/4282695
tcctcttaatctca

SEQ ID NO: 186323 - DNA, 14 bp, Unknown
  misc_feature (1)..( 14): Result.005 file - promoters50/4282695
tatacttacatgta

SEQ ID NO: 186324 - DNA, 14 bp, Unknown
  misc_feature (1)..( 14): Result.005 file - promoters50/4282695
cctaattactctaa

SEQ ID NO: 186325 - DNA, 9 bp, Unknown
  misc_feature (1)..( 9): Result.005 file - promoters50/4282695
aaaaaaatt

SEQ ID NO: 186326 - DNA, 9 bp, Unknown
  misc_feature (1)..( 9): Result.005 file - promoters50/4282695
caaaagatt

SEQ ID NO: 186327 - DNA, 9 bp, Unknown
  misc_feature (1)..( 9): Result.005 file - promoters50/4282695
taacaaatt

SEQ ID NO: 186328 - DNA, 9 bp, Unknown
  misc_feature (1)..( 9): Result.005 file - promoters50/4282695
taaaaaagc

SEQ ID NO: 186329 - DNA, 10 bp, Unknown
  misc_feature (1)..( 10): Result.005 file - promoters50/4282695
caatcaaaac

SEQ ID NO: 186330 - DNA, 10 bp, Unknown
  misc_feature (1)..( 10): Result.005 file - promoters50/4282695
taaccaatcc

SEQ ID NO: 186331 - DNA, 8 bp, Unknown
  misc_feature (1)..( 8): Result.005 file - promoters50/4282717
ctgatgct

SEQ ID NO: 186332 - DNA, 8 bp, Unknown
  misc_feature (1)..( 8): Result.005 file - promoters50/4282717
ctgatgga

SEQ ID NO: 186333 - DNA, 8 bp, Unknown
  misc_feature (1)..( 8): Result.005 file - promoters50/4282717
ttgaggct

SEQ ID NO: 186334 - DNA, 8 bp, Unknown
  misc_feature (1)..( 8): Result.005 file - promoters50/4282717
ttgtggct

SEQ ID NO: 186335 - DNA, 7 bp, Unknown
  misc_feature (1)..( 7): Result.005 file - promoters50/4282717
taaattt

SEQ ID NO: 186336 - DNA, 7 bp, Unknown
  misc_feature (1)..( 7): Result.005 file - promoters50/4282717
taaattg

SEQ ID NO: 186337 - DNA, 8 bp, Unknown
  misc_feature (1)..( 8): Result.005 file - promoters50/4282717
caaagtta

SEQ ID NO: 186338 - DNA, 12 bp, Unknown
  misc_feature (1)..( 12): Result.005 file - promoters50/4282717
cttagaataaaa

SEQ ID NO: 186339 - DNA, 12 bp, Unknown
  misc_feature (1)..( 12): Result.005 file - promoters50/4282717
agggaaatgaaa

SEQ ID NO: 186340 - DNA, 12 bp, Unknown
  misc_feature (1)..( 12): Result.005 file - promoters50/4282717
cttacaataata

SEQ ID NO: 186341 - DNA, 8 bp, Unknown
  misc_feature (1)..( 8): Result.005 file - promoters50/4282717
caaattga

SEQ ID NO: 186342 - DNA, 8 bp, Unknown
  misc_feature (1)..( 8): Result.005 file - promoters50/4282717
taaattga

SEQ ID NO: 186343 - DNA, 8 bp, Unknown
  misc_feature (1)..( 8): Result.005 file - promoters50/4282717
caaattaa

SEQ ID NO: 186344 - DNA, 12 bp, Unknown
  misc_feature (1)..( 12): Result.005 file - promoters50/4282717
ttgttaatattt

SEQ ID NO: 186345 - DNA, 12 bp, Unknown
  misc_feature (1)..( 12): Result.005 file - promoters50/4282717
ttgataacattt

SEQ ID NO: 186346 - DNA, 12 bp, Unknown
  misc_feature (1)..( 12): Result.005 file - promoters50/4282717
ggtaaaacattg

SEQ ID NO: 186347 - DNA, 10 bp, Unknown
  misc_feature (1)..( 10): Result.005 file - promoters50/4282717
taatattttt

SEQ ID NO: 186348 - DNA, 10 bp, Unknown
  misc_feature (1)..( 10): Result.005 file - promoters50/4282717
ttacattttt

SEQ ID NO: 186349 - DNA, 10 bp, Unknown
  misc_feature (1)..( 10): Result.005 file - promoters50/4282717
tacaattttg

SEQ ID NO: 186350 - DNA, 9 bp, Unknown
  misc_feature (1)..( 9): Result.005 file - promoters50/4282717
aaaacattg

SEQ ID NO: 186351 - DNA, 9 bp, Unknown
  misc_feature (1)..( 9): Result.005 file - promoters50/4282717
aaaacattg

SEQ ID NO: 186352 - DNA, 9 bp, Unknown
  misc_feature (1)..( 9): Result.005 file - promoters50/4282717
ataacattt

SEQ ID NO: 186353 - DNA, 8 bp, Unknown
  misc_feature (1)..( 8): Result.005 file - promoters50/4282744
atacataa

SEQ ID NO: 186354 - DNA, 8 bp, Unknown
  misc_feature (1)..( 8): Result.005 file - promoters50/4282744
atacatac

SEQ ID NO: 186355 - DNA, 8 bp, Unknown
  misc_feature (1)..( 8): Result.005 file - promoters50/4282744
aaacataa

SEQ ID NO: 186356 - DNA, 8 bp, Unknown
  misc_feature (1)..( 8): Result.005 file - promoters50/4282744
aaagatat

SEQ ID NO: 186357 - DNA, 9 bp, Unknown
  misc_feature (1)..( 9): Result.005 file - promoters50/4282748
cataaattt

SEQ ID NO: 186358 - DNA, 9 bp, Unknown
  misc_feature (1)..( 9): Result.005 file - promoters50/4282748
cataaattc

SEQ ID NO: 186359 - DNA, 9 bp, Unknown
  misc_feature (1)..( 9): Result.005 file - promoters50/4282748
tatatattt

SEQ ID NO: 186360 - DNA, 9 bp, Unknown
  misc_feature (1)..( 9): Result.005 file - promoters50/4282748
ttaaaattt

SEQ ID NO: 186361 - DNA, 9 bp, Unknown
  misc_feature (1)..( 9): Result.005 file - promoters50/4282748
cacaaaaaa

SEQ ID NO: 186362 - DNA, 8 bp, Unknown
  misc_feature (1)..( 8): Result.005 file - promoters50/4282760
taagaaat

SEQ ID NO: 186363 - DNA, 8 bp, Unknown
  misc_feature (1)..( 8): Result.005 file - promoters50/4282760
taaaaaaa

SEQ ID NO: 186364 - DNA, 9 bp, Unknown
  misc_feature (1)..( 9): Result.005 file - promoters50/4282760
taaataaaa

SEQ ID NO: 186365 - DNA, 9 bp, Unknown
  misc_feature (1)..( 9): Result.005 file - promoters50/4282760
taaaataca

SEQ ID NO: 186366 - DNA, 9 bp, Unknown
  misc_feature (1)..( 9): Result.005 file - promoters50/4282760
caaacttga

SEQ ID NO: 186367 - DNA, 9 bp, Unknown
  misc_feature (1)..( 9): Result.005 file - promoters50/4282760
aaaaattga

SEQ ID NO: 186368 - DNA, 9 bp, Unknown
  misc_feature (1)..( 9): Result.005 file - promoters50/4282760
taaaattaa

SEQ ID NO: 186369 - DNA, 9 bp, Unknown
  misc_feature (1)..( 9): Result.005 file - promoters50/4282760
taaaataca

SEQ ID NO: 186370 - DNA, 9 bp, Unknown
  misc_feature (1)..( 9): Result.005 file - promoters50/4282760
tttgactaa

SEQ ID NO: 186371 - DNA, 9 bp, Unknown
  misc_feature (1)..( 9): Result.005 file - promoters50/4282760
attgaataa

SEQ ID NO: 186372 - DNA, 9 bp, Unknown
  misc_feature (1)..( 9): Result.005 file - promoters50/4282760
gttgtataa

SEQ ID NO: 186373 - DNA, 9 bp, Unknown
  misc_feature (1)..( 9): Result.005 file - promoters50/4282760
gttttattt

SEQ ID NO: 186374 - DNA, 10 bp, Unknown
  misc_feature (1)..( 10): Result.005 file - promoters50/4282760
atttgatcga

SEQ ID NO: 186375 - DNA, 10 bp, Unknown
  misc_feature (1)..( 10): Result.005 file - promoters50/4282760
gttttatcat

SEQ ID NO: 186376 - DNA, 10 bp, Unknown
  misc_feature (1)..( 10): Result.005 file - promoters50/4282760
attttatata

SEQ ID NO: 186377 - DNA, 10 bp, Unknown
  misc_feature (1)..( 10): Result.005 file - promoters50/4282760
gttttaggag

SEQ ID NO: 186378 - DNA, 10 bp, Unknown
  misc_feature (1)..( 10): Result.005 file - promoters50/4282760
aacttaacat

SEQ ID NO: 186379 - DNA, 13 bp, Unknown
  misc_feature (1)..( 13): Result.005 file - promoters50/4282760
accaaaagtcata

SEQ ID NO: 186380 - DNA, 13 bp, Unknown
  misc_feature (1)..( 13): Result.005 file - promoters50/4282760
accaaaagtcgat

SEQ ID NO: 186381 - DNA, 13 bp, Unknown
  misc_feature (1)..( 13): Result.005 file - promoters50/4282760
ttctaaagtcttg

SEQ ID NO: 186382 - DNA, 13 bp, Unknown
  misc_feature (1)..( 13): Result.005 file - promoters50/4282760
gatttaagtagat

SEQ ID NO: 186383 - DNA, 7 bp, Unknown
  misc_feature (1)..( 7): Result.005 file - promoters50/4282760
attttat

SEQ ID NO: 186384 - DNA, 7 bp, Unknown
  misc_feature (1)..( 7): Result.005 file - promoters50/4282760
gttttat

SEQ ID NO: 186385 - DNA, 7 bp, Unknown
  misc_feature (1)..( 7): Result.005 file - promoters50/4282760
gttttat

SEQ ID NO: 186386 - DNA, 7 bp, Unknown
  misc_feature (1)..( 7): Result.005 file - promoters50/4282760
gttttag

SEQ ID NO: 186387 - DNA, 9 bp, Unknown
  misc_feature (1)..( 9): Result.005 file - promoters50/4282776
tttaacaca

SEQ ID NO: 186388 - DNA, 9 bp, Unknown
  misc_feature (1)..( 9): Result.005 file - promoters50/4282776
gataaaaca

SEQ ID NO: 186389 - DNA, 9 bp, Unknown
  misc_feature (1)..( 9): Result.005 file - promoters50/4282776
gataaaacc

SEQ ID NO: 186390 - DNA, 8 bp, Unknown
  misc_feature (1)..( 8): Result.005 file - promoters50/4282776
attgaaaa

SEQ ID NO: 186391 - DNA, 8 bp, Unknown
  misc_feature (1)..( 8): Result.005 file - promoters50/4282776
attaaaaa

SEQ ID NO: 186392 - DNA, 8 bp, Unknown
  misc_feature (1)..( 8): Result.005 file - promoters50/4282776
attaaata

SEQ ID NO: 186393 - DNA, 6 bp, Unknown
  misc_feature (1)..( 6): Result.005 file - promoters50/4282776
aaaatc

SEQ ID NO: 186394 - DNA, 6 bp, Unknown
  misc_feature (1)..( 6): Result.005 file - promoters50/4282776
aaaatc

SEQ ID NO: 186395 - DNA, 7 bp, Unknown
  misc_feature (1)..( 7): Result.005 file - promoters50/4282776
aaatatc

SEQ ID NO: 186396 - DNA, 8 bp, Unknown
  misc_feature (1)..( 8): Result.005 file - promoters50/4282776
actactta

SEQ ID NO: 186397 - DNA, 8 bp, Unknown
  misc_feature (1)..( 8): Result.005 file - promoters50/4282776
actacttc

SEQ ID NO: 186398 - DNA, 8 bp, Unknown
  misc_feature (1)..( 8): Result.005 file - promoters50/4282776
tgtacttc

SEQ ID NO: 186399 - DNA, 7 bp, Unknown
  misc_feature (1)..( 7): Result.005 file - promoters50/4282776
ataaaat

SEQ ID NO: 186400 - DNA, 7 bp, Unknown
  misc_feature (1)..( 7): Result.005 file - promoters50/4282776
ataaaat

SEQ ID NO: 186401 - DNA, 7 bp, Unknown
  misc_feature (1)..( 7): Result.005 file - promoters50/4282776
ttaaaat

SEQ ID NO: 186402 - DNA, 9 bp, Unknown
  misc_feature (1)..( 9): Result.005 file - promoters50/4282776
aaagtagaa

SEQ ID NO: 186403 - DNA, 9 bp, Unknown
  misc_feature (1)..( 9): Result.005 file - promoters50/4282776
gaaggagaa

SEQ ID NO: 186404 - DNA, 9 bp, Unknown
  misc_feature (1)..( 9): Result.005 file - promoters50/4282776
aaaatagaa

SEQ ID NO: 186405 - DNA, 9 bp, Unknown
  misc_feature (1)..( 9): Result.005 file - promoters50/4282776
caaatctct

SEQ ID NO: 186406 - DNA, 9 bp, Unknown
  misc_feature (1)..( 9): Result.005 file - promoters50/4282776
caattctct

SEQ ID NO: 186407 - DNA, 9 bp, Unknown
  misc_feature (1)..( 9): Result.005 file - promoters50/4282776
accttctct

SEQ ID NO: 186408 - DNA, 7 bp, Unknown
  misc_feature (1)..( 7): Result.005 file - promoters50/4282776
ttaagtc

SEQ ID NO: 186409 - DNA, 7 bp, Unknown
  misc_feature (1)..( 7): Result.005 file - promoters50/4282776
ttaggtc

SEQ ID NO: 186410 - DNA, 7 bp, Unknown
  misc_feature (1)..( 7): Result.005 file - promoters50/4282776
ttaggta

SEQ ID NO: 186411 - DNA, 8 bp, Unknown
  misc_feature (1)..( 8): Result.005 file - promoters50/4282788
gttgcttt

SEQ ID NO: 186412 - DNA, 8 bp, Unknown
  misc_feature (1)..( 8): Result.005 file - promoters50/4282788
tttgattt

SEQ ID NO: 186413 - DNA, 8 bp, Unknown
  misc_feature (1)..( 8): Result.005 file - promoters50/4282788
tttgattg

SEQ ID NO: 186414 - DNA, 8 bp, Unknown
  misc_feature (1)..( 8): Result.005 file - promoters50/4282788
tttgtttg

SEQ ID NO: 186415 - DNA, 8 bp, Unknown
  misc_feature (1)..( 8): Result.005 file - promoters50/4282788
cttgattc

SEQ ID NO: 186416 - DNA, 12 bp, Unknown
  misc_feature (1)..( 12): Result.005 file - promoters50/4282788
ctacttctctaa

SEQ ID NO: 186417 - DNA, 12 bp, Unknown
  misc_feature (1)..( 12): Result.005 file - promoters50/4282788
tatgctctgtaa

SEQ ID NO: 186418 - DNA, 12 bp, Unknown
  misc_feature (1)..( 12): Result.005 file - promoters50/4282788
acttatcttgat

SEQ ID NO: 186419 - DNA, 12 bp, Unknown
  misc_feature (1)..( 12): Result.005 file - promoters50/4282788
cttcttctgtag

SEQ ID NO: 186420 - DNA, 10 bp, Unknown
  misc_feature (1)..( 10): Result.005 file - promoters50/4282795
cttttgattt

SEQ ID NO: 186421 - DNA, 10 bp, Unknown
  misc_feature (1)..( 10): Result.005 file - promoters50/4282795
cttttaattg

SEQ ID NO: 186422 - DNA, 10 bp, Unknown
  misc_feature (1)..( 10): Result.005 file - promoters50/4282795
gttttgtttt

SEQ ID NO: 186423 - DNA, 10 bp, Unknown
  misc_feature (1)..( 10): Result.005 file - promoters50/4282795
atttcgatgt

SEQ ID NO: 186424 - DNA, 13 bp, Unknown
  misc_feature (1)..( 13): Result.005 file - promoters50/4282795
tttagtttattcg

SEQ ID NO: 186425 - DNA, 13 bp, Unknown
  misc_feature (1)..( 13): Result.005 file - promoters50/4282795
tttagttaatgtt

SEQ ID NO: 186426 - DNA, 13 bp, Unknown
  misc_feature (1)..( 13): Result.005 file - promoters50/4282795
aatagttgattcg

SEQ ID NO: 186427 - DNA, 13 bp, Unknown
  misc_feature (1)..( 13): Result.005 file - promoters50/4282795
cttatttttattt

SEQ ID NO: 186428 - DNA, 7 bp, Unknown
  misc_feature (1)..( 7): Result.005 file - promoters50/4282795
aatgttt

SEQ ID NO: 186429 - DNA, 7 bp, Unknown
  misc_feature (1)..( 7): Result.005 file - promoters50/4282795
aatgttt

SEQ ID NO: 186430 - DNA, 7 bp, Unknown
  misc_feature (1)..( 7): Result.005 file - promoters50/4282795
aatattt

SEQ ID NO: 186431 - DNA, 7 bp, Unknown
  misc_feature (1)..( 7): Result.005 file - promoters50/4282795
aatatta

SEQ ID NO: 186432 - DNA, 13 bp, Unknown
  misc_feature (1)..( 13): Result.005 file - promoters50/4282795
tagttaatgtttt

SEQ ID NO: 186433 - DNA, 13 bp, Unknown
  misc_feature (1)..( 13): Result.005 file - promoters50/4282795
aggttaattacgt

SEQ ID NO: 186434 - DNA, 13 bp, Unknown
  misc_feature (1)..( 13): Result.005 file - promoters50/4282795
atattaatgggcc

SEQ ID NO: 186435 - DNA, 13 bp, Unknown
  misc_feature (1)..( 13): Result.005 file - promoters50/4282795
tagctaaacatct

SEQ ID NO: 186436 - DNA, 13 bp, Unknown
  misc_feature (1)..( 13): Result.005 file - promoters50/4282795
ctattaatatttt

SEQ ID NO: 186437 - DNA, 9 bp, Unknown
  misc_feature (1)..( 9): Result.005 file - promoters50/4282795
tttaagact

SEQ ID NO: 186438 - DNA, 9 bp, Unknown
  misc_feature (1)..( 9): Result.005 file - promoters50/4282795
ttttagaaa

SEQ ID NO: 186439 - DNA, 10 bp, Unknown
  misc_feature (1)..( 10): Result.005 file - promoters50/4282795
tttgtataaa

SEQ ID NO: 186440 - DNA, 10 bp, Unknown
  misc_feature (1)..( 10): Result.005 file - promoters50/4282795
ataatataaa

SEQ ID NO: 186441 - DNA, 12 bp, Unknown
  misc_feature (1)..( 12): Result.005 file - promoters50/4282795
aacttttaagta

SEQ ID NO: 186442 - DNA, 12 bp, Unknown
  misc_feature (1)..( 12): Result.005 file - promoters50/4282795
aacctttatgta

SEQ ID NO: 186443 - DNA, 12 bp, Unknown
  misc_feature (1)..( 12): Result.005 file - promoters50/4282795
ttattttcagta

SEQ ID NO: 186444 - DNA, 12 bp, Unknown
  misc_feature (1)..( 12): Result.005 file - promoters50/4282795
cgggtttatgtt

SEQ ID NO: 186445 - DNA, 10 bp, Unknown
  misc_feature (1)..( 10): Result.005 file - promoters50/4282877
caaaagaaaa

SEQ ID NO: 186446 - DNA, 10 bp, Unknown
  misc_feature (1)..( 10): Result.005 file - promoters50/4282877
aaaaacaaaa

SEQ ID NO: 186447 - DNA, 10 bp, Unknown
  misc_feature (1)..( 10): Result.005 file - promoters50/4282877
gaaaggaatt

SEQ ID NO: 186448 - DNA, 10 bp, Unknown
  misc_feature (1)..( 10): Result.005 file - promoters50/4282877
tgaaagaaaa

SEQ ID NO: 186449 - DNA, 10 bp, Unknown
  misc_feature (1)..( 10): Result.005 file - promoters50/4282877
caaaataaaa

SEQ ID NO: 186450 - DNA, 10 bp, Unknown
  misc_feature (1)..( 10): Result.005 file - promoters50/4282877
gaaaataaat

SEQ ID NO: 186451 - DNA, 10 bp, Unknown
  misc_feature (1)..( 10): Result.005 file - promoters50/4282877
tgttcatggc

SEQ ID NO: 186452 - DNA, 10 bp, Unknown
  misc_feature (1)..( 10): Result.005 file - promoters50/4282877
agtttatgag

SEQ ID NO: 186453 - DNA, 10 bp, Unknown
  misc_feature (1)..( 10): Result.005 file - promoters50/4282877
atttcttggg

SEQ ID NO: 186454 - DNA, 10 bp, Unknown
  misc_feature (1)..( 10): Result.005 file - promoters50/4282877
aaatctaggg

SEQ ID NO: 186455 - DNA, 10 bp, Unknown
  misc_feature (1)..( 10): Result.005 file - promoters50/4282877
ttttcttatg

SEQ ID NO: 186456 - DNA, 10 bp, Unknown
  misc_feature (1)..( 10): Result.005 file - promoters50/4282877
ttttcttgtc

SEQ ID NO: 186457 - DNA, 9 bp, Unknown
  misc_feature (1)..( 9): Result.005 file - promoters50/4282877
tagtatttt

SEQ ID NO: 186458 - DNA, 9 bp, Unknown
  misc_feature (1)..( 9): Result.005 file - promoters50/4282877
gagtattat

SEQ ID NO: 186459 - DNA, 9 bp, Unknown
  misc_feature (1)..( 9): Result.005 file - promoters50/4282877
gagtgtttt

SEQ ID NO: 186460 - DNA, 9 bp, Unknown
  misc_feature (1)..( 9): Result.005 file - promoters50/4282877
tagcattta

SEQ ID NO: 186461 - DNA, 9 bp, Unknown
  misc_feature (1)..( 9): Result.005 file - promoters50/4282877
gagggtttt

SEQ ID NO: 186462 - DNA, 9 bp, Unknown
  misc_feature (1)..( 9): Result.005 file - promoters50/4282877
tagaattgg

SEQ ID NO: 186463 - DNA, 9 bp, Unknown
  misc_feature (1)..( 9): Result.005 file - promoters50/4282915
tttcacaat

SEQ ID NO: 186464 - DNA, 9 bp, Unknown
  misc_feature (1)..( 9): Result.005 file - promoters50/4282915
ttttacaaa

SEQ ID NO: 186465 - DNA, 9 bp, Unknown
  misc_feature (1)..( 9): Result.005 file - promoters50/4282915
tatcacaag

SEQ ID NO: 186466 - DNA, 9 bp, Unknown
  misc_feature (1)..( 9): Result.005 file - promoters50/4282915
cgttaaaaa

SEQ ID NO: 186467 - DNA, 9 bp, Unknown
  misc_feature (1)..( 9): Result.005 file - promoters50/4282915
gaatacaaa

SEQ ID NO: 186468 - DNA, 9 bp, Unknown
  misc_feature (1)..( 9): Result.005 file - promoters50/4282915
aatcacaca

SEQ ID NO: 186469 - DNA, 10 bp, Unknown
  misc_feature (1)..( 10): Result.005 file - promoters50/4282923
aacttataaa

SEQ ID NO: 186470 - DNA, 10 bp, Unknown
  misc_feature (1)..( 10): Result.005 file - promoters50/4282923
aacttatgac

SEQ ID NO: 186471 - DNA, 10 bp, Unknown
  misc_feature (1)..( 10): Result.005 file - promoters50/4282923
aactcataaa

SEQ ID NO: 186472 - DNA, 7 bp, Unknown
  misc_feature (1)..( 7): Result.005 file - promoters50/4282931
attaaaa

SEQ ID NO: 186473 - DNA, 7 bp, Unknown
  misc_feature (1)..( 7): Result.005 file - promoters50/4282931
cttaaaa

SEQ ID NO: 186474 - DNA, 7 bp, Unknown
  misc_feature (1)..( 7): Result.005 file - promoters50/4282931
attaaaa

SEQ ID NO: 186475 - DNA, 8 bp, Unknown
  misc_feature (1)..( 8): Result.005 file - promoters50/4282931
taaaccta

SEQ ID NO: 186476 - DNA, 8 bp, Unknown
  misc_feature (1)..( 8): Result.005 file - promoters50/4282931
aaaatcta

SEQ ID NO: 186477 - DNA, 8 bp, Unknown
  misc_feature (1)..( 8): Result.005 file - promoters50/4282931
aaaatcgt

SEQ ID NO: 186478 - DNA, 10 bp, Unknown
  misc_feature (1)..( 10): Result.005 file - promoters50/4282931
aaattcaaga

SEQ ID NO: 186479 - DNA, 10 bp, Unknown
  misc_feature (1)..( 10): Result.005 file - promoters50/4282931
aaaatcataa

SEQ ID NO: 186480 - DNA, 10 bp, Unknown
  misc_feature (1)..( 10): Result.005 file - promoters50/4282931
taattataaa

SEQ ID NO: 186481 - DNA, 9 bp, Unknown
  misc_feature (1)..( 9): Result.005 file - promoters50/4282931
attcataaa

SEQ ID NO: 186482 - DNA, 9 bp, Unknown
  misc_feature (1)..( 9): Result.005 file - promoters50/4282931
aatcataaa

SEQ ID NO: 186483 - DNA, 9 bp, Unknown
  misc_feature (1)..( 9): Result.005 file - promoters50/4282931
aattataaa

SEQ ID NO: 186484 - DNA, 10 bp, Unknown
  misc_feature (1)..( 10): Result.005 file - promoters50/4282931
caataattca

SEQ ID NO: 186485 - DNA, 10 bp, Unknown
  misc_feature (1)..( 10): Result.005 file - promoters50/4282931
caaaaattca

SEQ ID NO: 186486 - DNA, 10 bp, Unknown
  misc_feature (1)..( 10): Result.005 file - promoters50/4282931
ttataattat

SEQ ID NO: 186487 - DNA, 6 bp, Unknown
  misc_feature (1)..( 6): Result.005 file - promoters50/4282931
aaaatc

SEQ ID NO: 186488 - DNA, 6 bp, Unknown
  misc_feature (1)..( 6): Result.005 file - promoters50/4282931
aaaatc

SEQ ID NO: 186489 - DNA, 6 bp, Unknown
  misc_feature (1)..( 6): Result.005 file - promoters50/4282931
aaaatc

SEQ ID NO: 186490 - DNA, 8 bp, Unknown
  misc_feature (1)..( 8): Result.005 file - promoters50/4282939
attacaaa

SEQ ID NO: 186491 - DNA, 8 bp, Unknown
  misc_feature (1)..( 8): Result.005 file - promoters50/4282939
tttagaaa

SEQ ID NO: 186492 - DNA, 8 bp, Unknown
  misc_feature (1)..( 8): Result.005 file - promoters50/4282939
ttttgaat

SEQ ID NO: 186493 - DNA, 8 bp, Unknown
  misc_feature (1)..( 8): Result.005 file - promoters50/4282945
aatatata

SEQ ID NO: 186494 - DNA, 8 bp, Unknown
  misc_feature (1)..( 8): Result.005 file - promoters50/4282945
aatgtatg

SEQ ID NO: 186495 - DNA, 8 bp, Unknown
  misc_feature (1)..( 8): Result.005 file - promoters50/4282945
ggtatata

SEQ ID NO: 186496 - DNA, 9 bp, Unknown
  misc_feature (1)..( 9): Result.005 file - promoters50/4282945
tatgtacat

SEQ ID NO: 186497 - DNA, 9 bp, Unknown
  misc_feature (1)..( 9): Result.005 file - promoters50/4282945
aatgaacat

SEQ ID NO: 186498 - DNA, 9 bp, Unknown
  misc_feature (1)..( 9): Result.005 file - promoters50/4282945
aattaaccc

SEQ ID NO: 186499 - DNA, 8 bp, Unknown
  misc_feature (1)..( 8): Result.005 file - promoters50/4282945
atatcttt

SEQ ID NO: 186500 - DNA, 8 bp, Unknown
  misc_feature (1)..( 8): Result.005 file - promoters50/4282945
tcatcttt

SEQ ID NO: 186501 - DNA, 8 bp, Unknown
  misc_feature (1)..( 8): Result.005 file - promoters50/4282945
tcattttt

SEQ ID NO: 186502 - DNA, 8 bp, Unknown
  misc_feature (1)..( 8): Result.005 file - promoters50/4282945
ctttcttt

SEQ ID NO: 186503 - DNA, 8 bp, Unknown
  misc_feature (1)..( 8): Result.005 file - promoters50/4282945
attttttt

SEQ ID NO: 186504 - DNA, 8 bp, Unknown
  misc_feature (1)..( 8): Result.005 file - promoters50/4282945
tcatcttt

SEQ ID NO: 186505 - DNA, 7 bp, Unknown
  misc_feature (1)..( 7): Result.005 file - promoters50/4282957
gttttaa

SEQ ID NO: 186506 - DNA, 7 bp, Unknown
  misc_feature (1)..( 7): Result.005 file - promoters50/4282957
gttttac

SEQ ID NO: 186507 - DNA, 7 bp, Unknown
  misc_feature (1)..( 7): Result.005 file - promoters50/4282957
gttttaa

SEQ ID NO: 186508 - DNA, 10 bp, Unknown
  misc_feature (1)..( 10): Result.005 file - promoters50/4282957
aaactagctt

SEQ ID NO: 186509 - DNA, 10 bp, Unknown
  misc_feature (1)..( 10): Result.005 file - promoters50/4282957
ttactacctt

SEQ ID NO: 186510 - DNA, 10 bp, Unknown
  misc_feature (1)..( 10): Result.005 file - promoters50/4282957
ttactacgta

SEQ ID NO: 186511 - DNA, 13 bp, Unknown
  misc_feature (1)..( 13): Result.005 file - promoters50/4282957
gttgaaactatca

SEQ ID NO: 186512 - DNA, 13 bp, Unknown
  misc_feature (1)..( 13): Result.005 file - promoters50/4282957
aaagaaactatca

SEQ ID NO: 186513 - DNA, 13 bp, Unknown
  misc_feature (1)..( 13): Result.005 file - promoters50/4282957
aaaaaaacgtttc

SEQ ID NO: 186514 - DNA, 7 bp, Unknown
  misc_feature (1)..( 7): Result.005 file - promoters50/4282957
aaataac

SEQ ID NO: 186515 - DNA, 7 bp, Unknown
  misc_feature (1)..( 7): Result.005 file - promoters50/4282957
aaaaaac

SEQ ID NO: 186516 - DNA, 8 bp, Unknown
  misc_feature (1)..( 8): Result.005 file - promoters50/4282957
aaagaaac

SEQ ID NO: 186517 - DNA, 10 bp, Unknown
  misc_feature (1)..( 10): Result.005 file - promoters50/4282995
gagcttgaga

SEQ ID NO: 186518 - DNA, 10 bp, Unknown
  misc_feature (1)..( 10): Result.005 file - promoters50/4282995
gagtttgaat

SEQ ID NO: 186519 - DNA, 10 bp, Unknown
  misc_feature (1)..( 10): Result.005 file - promoters50/4282995
tagcttgaga

SEQ ID NO: 186520 - DNA, 7 bp, Unknown
  misc_feature (1)..( 7): Result.005 file - promoters50/4282995
aattgaa

SEQ ID NO: 186521 - DNA, 7 bp, Unknown
  misc_feature (1)..( 7): Result.005 file - promoters50/4282995
aattgaa

SEQ ID NO: 186522 - DNA, 7 bp, Unknown
  misc_feature (1)..( 7): Result.005 file - promoters50/4282995
tattgaa

SEQ ID NO: 186523 - DNA, 9 bp, Unknown
  misc_feature (1)..( 9): Result.005 file - promoters50/4282995
gaaaattga

SEQ ID NO: 186524 - DNA, 9 bp, Unknown
  misc_feature (1)..( 9): Result.005 file - promoters50/4282995
gaaaatcac

SEQ ID NO: 186525 - DNA, 9 bp, Unknown
  misc_feature (1)..( 9): Result.005 file - promoters50/4282995
ctaaattca

SEQ ID NO: 186526 - DNA, 11 bp, Unknown
  misc_feature (1)..( 11): Result.005 file - promoters50/4283003
aatattttagg

SEQ ID NO: 186527 - DNA, 11 bp, Unknown
  misc_feature (1)..( 11): Result.005 file - promoters50/4283003
aataatttgta

SEQ ID NO: 186528 - DNA, 11 bp, Unknown
  misc_feature (1)..( 11): Result.005 file - promoters50/4283003
aattattggta

SEQ ID NO: 186529 - DNA, 11 bp, Unknown
  misc_feature (1)..( 11): Result.005 file - promoters50/4283003
aatttataaag

SEQ ID NO: 186530 - DNA, 8 bp, Unknown
  misc_feature (1)..( 8): Result.005 file - promoters50/4283003
cactctta

SEQ ID NO: 186531 - DNA, 8 bp, Unknown
  misc_feature (1)..( 8): Result.005 file - promoters50/4283003
atctctta

SEQ ID NO: 186532 - DNA, 8 bp, Unknown
  misc_feature (1)..( 8): Result.005 file - promoters50/4283003
atctcatc

SEQ ID NO: 186533 - DNA, 8 bp, Unknown
  misc_feature (1)..( 8): Result.005 file - promoters50/4283003
atctcaac

SEQ ID NO: 186534 - DNA, 9 bp, Unknown
  misc_feature (1)..( 9): Result.005 file - promoters50/4283003
ctatatata

SEQ ID NO: 186535 - DNA, 9 bp, Unknown
  misc_feature (1)..( 9): Result.005 file - promoters50/4283003
ctataaata

SEQ ID NO: 186536 - DNA, 9 bp, Unknown
  misc_feature (1)..( 9): Result.005 file - promoters50/4283003
ttatataag

SEQ ID NO: 186537 - DNA, 9 bp, Unknown
  misc_feature (1)..( 9): Result.005 file - promoters50/4283003
gtaagtatg

SEQ ID NO: 186538 - DNA, 8 bp, Unknown
  misc_feature (1)..( 8): Result.005 file - promoters50/4283003
ggaacaaa

SEQ ID NO: 186539 - DNA, 8 bp, Unknown
  misc_feature (1)..( 8): Result.005 file - promoters50/4283003
agaaaaaa

SEQ ID NO: 186540 - DNA, 8 bp, Unknown
  misc_feature (1)..( 8): Result.005 file - promoters50/4283003
tgaaaaag

SEQ ID NO: 186541 - DNA, 8 bp, Unknown
  misc_feature (1)..( 8): Result.005 file - promoters50/4283003
agaaaaag

SEQ ID NO: 186542 - DNA, 8 bp, Unknown
  misc_feature (1)..( 8): Result.005 file - promoters50/4283003
taacattg

SEQ ID NO: 186543 - DNA, 8 bp, Unknown
  misc_feature (1)..( 8): Result.005 file - promoters50/4283003
aaacattt

SEQ ID NO: 186544 - DNA, 8 bp, Unknown
  misc_feature (1)..( 8): Result.005 file - promoters50/4283003
aaactttg

SEQ ID NO: 186545 - DNA, 9 bp, Unknown
  misc_feature (1)..( 9): Result.005 file - promoters50/4283003
caatcatca

SEQ ID NO: 186546 - DNA, 11 bp, Unknown
  misc_feature (1)..( 11): Result.005 file - promoters50/4283005
tcaaagagaag

SEQ ID NO: 186547 - DNA, 11 bp, Unknown
  misc_feature (1)..( 11): Result.005 file - promoters50/4283005
aaaaaaagaag

SEQ ID NO: 186548 - DNA, 11 bp, Unknown
  misc_feature (1)..( 11): Result.005 file - promoters50/4283005
ttgatgagaag

SEQ ID NO: 186549 - DNA, 11 bp, Unknown
  misc_feature (1)..( 11): Result.005 file - promoters50/4283005
ccaaataaaat

SEQ ID NO: 186550 - DNA, 11 bp, Unknown
  misc_feature (1)..( 11): Result.005 file - promoters50/4283005
tcaaaaaaaaa

SEQ ID NO: 186551 - DNA, 11 bp, Unknown
  misc_feature (1)..( 11): Result.005 file - promoters50/4283005
acaaaaaaaat

SEQ ID NO: 186552 - DNA, 13 bp, Unknown
  misc_feature (1)..( 13): Result.005 file - promoters50/4283041
aaaaaaagaaaaa

SEQ ID NO: 186553 - DNA, 13 bp, Unknown
  misc_feature (1)..( 13): Result.005 file - promoters50/4283041
aaaaaaagaaaaa

SEQ ID NO: 186554 - DNA, 13 bp, Unknown
  misc_feature (1)..( 13): Result.005 file - promoters50/4283041
gccaaaagagtaa

SEQ ID NO: 186555 - DNA, 7 bp, Unknown
  misc_feature (1)..( 7): Result.005 file - promoters50/4283057
gttataa

SEQ ID NO: 186556 - DNA, 7 bp, Unknown
  misc_feature (1)..( 7): Result.005 file - promoters50/4283057
gttttaa

SEQ ID NO: 186557 - DNA, 7 bp, Unknown
  misc_feature (1)..( 7): Result.005 file - promoters50/4283057
gttgtaa

SEQ ID NO: 186558 - DNA, 14 bp, Unknown
  misc_feature (1)..( 14): Result.005 file - promoters50/4283057
cttttgaaagtctc

SEQ ID NO: 186559 - DNA, 14 bp, Unknown
  misc_feature (1)..( 14): Result.005 file - promoters50/4283057
ctttggaaaagaaa

SEQ ID NO: 186560 - DNA, 14 bp, Unknown
  misc_feature (1)..( 14): Result.005 file - promoters50/4283057
taagggaaatgaaa

SEQ ID NO: 186561 - DNA, 8 bp, Unknown
  misc_feature (1)..( 8): Result.005 file - promoters50/4283191
atttttac

SEQ ID NO: 186562 - DNA, 8 bp, Unknown
  misc_feature (1)..( 8): Result.005 file - promoters50/4283191
atttttga

SEQ ID NO: 186563 - DNA, 8 bp, Unknown
  misc_feature (1)..( 8): Result.005 file - promoters50/4283191
atttgtga

SEQ ID NO: 186564 - DNA, 8 bp, Unknown
  misc_feature (1)..( 8): Result.005 file - promoters50/4283191
ttatgtta

SEQ ID NO: 186565 - DNA, 8 bp, Unknown
  misc_feature (1)..( 8): Result.005 file - promoters50/4283191
ttaggttg

SEQ ID NO: 186566 - DNA, 8 bp, Unknown
  misc_feature (1)..( 8): Result.005 file - promoters50/4283191
gtagattg

SEQ ID NO: 186567 - DNA, 8 bp, Unknown
  misc_feature (1)..( 8): Result.005 file - promoters50/4283191
taattaaa

SEQ ID NO: 186568 - DNA, 8 bp, Unknown
  misc_feature (1)..( 8): Result.005 file - promoters50/4283191
aaattaaa

SEQ ID NO: 186569 - DNA, 8 bp, Unknown
  misc_feature (1)..( 8): Result.005 file - promoters50/4283191
aaattatg

SEQ ID NO: 186570 - DNA, 11 bp, Unknown
  misc_feature (1)..( 11): Result.005 file - promoters50/4283191
tcgatatgttc

SEQ ID NO: 186571 - DNA, 11 bp, Unknown
  misc_feature (1)..( 11): Result.005 file - promoters50/4283191
tcgatttgtga

SEQ ID NO: 186572 - DNA, 11 bp, Unknown
  misc_feature (1)..( 11): Result.005 file - promoters50/4283191
tttatttttga

SEQ ID NO: 186573 - DNA, 10 bp, Unknown
  misc_feature (1)..( 10): Result.005 file - promoters50/4283218
gtttctcatt

SEQ ID NO: 186574 - DNA, 10 bp, Unknown
  misc_feature (1)..( 10): Result.005 file - promoters50/4283218
ttttttcatt

SEQ ID NO: 186575 - DNA, 10 bp, Unknown
  misc_feature (1)..( 10): Result.005 file - promoters50/4283218
gtttcttttt

SEQ ID NO: 186576 - DNA, 10 bp, Unknown
  misc_feature (1)..( 10): Result.005 file - promoters50/4283218
gattttcaca

SEQ ID NO: 186577 - DNA, 11 bp, Unknown
  misc_feature (1)..( 11): Result.005 file - promoters50/4283218
atttttacata

SEQ ID NO: 186578 - DNA, 11 bp, Unknown
  misc_feature (1)..( 11): Result.005 file - promoters50/4283218
tctcttacatg

SEQ ID NO: 186579 - DNA, 16 bp, Unknown
  misc_feature (1)..( 16): Result.005 file - promoters50/4283218
tctatataatagtagc

SEQ ID NO: 186580 - DNA, 16 bp, Unknown
  misc_feature (1)..( 16): Result.005 file - promoters50/4283218
actatataatggtagc

SEQ ID NO: 186581 - DNA, 16 bp, Unknown
  misc_feature (1)..( 16): Result.005 file - promoters50/4283218
tctatataaacctcca

SEQ ID NO: 186582 - DNA, 16 bp, Unknown
  misc_feature (1)..( 16): Result.005 file - promoters50/4283218
attatttaaacaccaa

SEQ ID NO: 186583 - DNA, 16 bp, Unknown
  misc_feature (1)..( 16): Result.005 file - promoters50/4283218
catatatatccgcctt

SEQ ID NO: 186584 - DNA, 16 bp, Unknown
  misc_feature (1)..( 16): Result.005 file - promoters50/4283218
tgtatatatacccttc

SEQ ID NO: 186585 - DNA, 9 bp, Unknown
  misc_feature (1)..( 9): Result.005 file - promoters50/4283218
aaaaatatc

SEQ ID NO: 186586 - DNA, 9 bp, Unknown
  misc_feature (1)..( 9): Result.005 file - promoters50/4283218
taaattatg

SEQ ID NO: 186587 - DNA, 9 bp, Unknown
  misc_feature (1)..( 9): Result.005 file - promoters50/4283218
aaaaattaa

SEQ ID NO: 186588 - DNA, 9 bp, Unknown
  misc_feature (1)..( 9): Result.005 file - promoters50/4283218
ccaaatatt

SEQ ID NO: 186589 - DNA, 9 bp, Unknown
  misc_feature (1)..( 9): Result.005 file - promoters50/4283218
aaaaaagtt

SEQ ID NO: 186590 - DNA, 10 bp, Unknown
  misc_feature (1)..( 10): Result.005 file - promoters50/4283222
caaatattta

SEQ ID NO: 186591 - DNA, 10 bp, Unknown
  misc_feature (1)..( 10): Result.005 file - promoters50/4283222
gaaatatttt

SEQ ID NO: 186592 - DNA, 10 bp, Unknown
  misc_feature (1)..( 10): Result.005 file - promoters50/4283222
aaaagatttt

SEQ ID NO: 186593 - DNA, 11 bp, Unknown
  misc_feature (1)..( 11): Result.005 file - promoters50/4283222
tgttttattta

SEQ ID NO: 186594 - DNA, 10 bp, Unknown
  misc_feature (1)..( 10): Result.005 file - promoters50/4283222
aaaatgtttg

SEQ ID NO: 186595 - DNA, 11 bp, Unknown
  misc_feature (1)..( 11): Result.005 file - promoters50/4283222
tctaataatta

SEQ ID NO: 186596 - DNA, 11 bp, Unknown
  misc_feature (1)..( 11): Result.005 file - promoters50/4283222
aaatatattta

SEQ ID NO: 186597 - DNA, 15 bp, Unknown
  misc_feature (1)..( 15): Result.005 file - promoters50/4283222
actaataatgtataa

SEQ ID NO: 186598 - DNA, 15 bp, Unknown
  misc_feature (1)..( 15): Result.005 file - promoters50/4283222
atgaataattttact

SEQ ID NO: 186599 - DNA, 15 bp, Unknown
  misc_feature (1)..( 15): Result.005 file - promoters50/4283222
taaaataatatataa

SEQ ID NO: 186600 - DNA, 15 bp, Unknown
  misc_feature (1)..( 15): Result.005 file - promoters50/4283222
atgaagaatctgatg

SEQ ID NO: 186601 - DNA, 15 bp, Unknown
  misc_feature (1)..( 15): Result.005 file - promoters50/4283222
ttggataatatgcaa

SEQ ID NO: 186602 - DNA, 15 bp, Unknown
  misc_feature (1)..( 15): Result.005 file - promoters50/4283222
gttaattatatacac

SEQ ID NO: 186603 - DNA, 15 bp, Unknown
  misc_feature (1)..( 15): Result.005 file - promoters50/4283222
ttaaataaatgaaat

SEQ ID NO: 186604 - DNA, 11 bp, Unknown
  misc_feature (1)..( 11): Result.005 file - promoters50/4283222
taaaataatta

SEQ ID NO: 186605 - DNA, 11 bp, Unknown
  misc_feature (1)..( 11): Result.005 file - promoters50/4283222
gaaaacaattt

SEQ ID NO: 186606 - DNA, 11 bp, Unknown
  misc_feature (1)..( 11): Result.005 file - promoters50/4283222
taaactaattt

SEQ ID NO: 186607 - DNA, 11 bp, Unknown
  misc_feature (1)..( 11): Result.005 file - promoters50/4283222
taaactattct

SEQ ID NO: 186608 - DNA, 11 bp, Unknown
  misc_feature (1)..( 11): Result.005 file - promoters50/4283222
gcaactaattt

SEQ ID NO: 186609 - DNA, 11 bp, Unknown
  misc_feature (1)..( 11): Result.005 file - promoters50/4283222
gaaactatata

SEQ ID NO: 186610 - DNA, 14 bp, Unknown
  misc_feature (1)..( 14): Result.005 file - promoters50/4283222
aaatatttttatgt

SEQ ID NO: 186611 - DNA, 14 bp, Unknown
  misc_feature (1)..( 14): Result.005 file - promoters50/4283222
aaaagattttataa

SEQ ID NO: 186612 - DNA, 14 bp, Unknown
  misc_feature (1)..( 14): Result.005 file - promoters50/4283222
taattgttttattt

SEQ ID NO: 186613 - DNA, 14 bp, Unknown
  misc_feature (1)..( 14): Result.005 file - promoters50/4283222
aaatatatttaatc

SEQ ID NO: 186614 - DNA, 14 bp, Unknown
  misc_feature (1)..( 14): Result.005 file - promoters50/4283222
gcggatttctaata

SEQ ID NO: 186615 - DNA, 14 bp, Unknown
  misc_feature (1)..( 14): Result.005 file - promoters50/4283222
tcgacaatgtatga

SEQ ID NO: 186616 - DNA, 12 bp, Unknown
  misc_feature (1)..( 12): Result.005 file - promoters50/4283222
aaatctattaac

SEQ ID NO: 186617 - DNA, 12 bp, Unknown
  misc_feature (1)..( 12): Result.005 file - promoters50/4283222
caatgtatgatc

SEQ ID NO: 186618 - DNA, 12 bp, Unknown
  misc_feature (1)..( 12): Result.005 file - promoters50/4283222
atttctaataat

SEQ ID NO: 186619 - DNA, 12 bp, Unknown
  misc_feature (1)..( 12): Result.005 file - promoters50/4283222
aaatatatttaa

SEQ ID NO: 186620 - DNA, 12 bp, Unknown
  misc_feature (1)..( 12): Result.005 file - promoters50/4283222
gattttataata

SEQ ID NO: 186621 - DNA, 12 bp, Unknown
  misc_feature (1)..( 12): Result.005 file - promoters50/4283222
tgatttataatt

SEQ ID NO: 186622 - DNA, 12 bp, Unknown
  misc_feature (1)..( 12): Result.005 file - promoters50/4283222
ggatgtatgcac

SEQ ID NO: 186623 - DNA, 9 bp, Unknown
  misc_feature (1)..( 9): Result.005 file - promoters50/4283230
aatatgaat

SEQ ID NO: 186624 - DNA, 9 bp, Unknown
  misc_feature (1)..( 9): Result.005 file - promoters50/4283230
tatataaat

SEQ ID NO: 186625 - DNA, 9 bp, Unknown
  misc_feature (1)..( 9): Result.005 file - promoters50/4283230
tatagaaat

SEQ ID NO: 186626 - DNA, 9 bp, Unknown
  misc_feature (1)..( 9): Result.005 file - promoters50/4283230
gataaaaaa

SEQ ID NO: 186627 - DNA, 9 bp, Unknown
  misc_feature (1)..( 9): Result.005 file - promoters50/4283230
gattaaacc

SEQ ID NO: 186628 - DNA, 9 bp, Unknown
  misc_feature (1)..( 9): Result.005 file - promoters50/4283230
gataaaaca

SEQ ID NO: 186629 - DNA, 16 bp, Unknown
  misc_feature (1)..( 16): Result.005 file - promoters50/4283230
aagtaaaaatacattc

SEQ ID NO: 186630 - DNA, 16 bp, Unknown
  misc_feature (1)..( 16): Result.005 file - promoters50/4283230
ctattaaaatactccg

SEQ ID NO: 186631 - DNA, 16 bp, Unknown
  misc_feature (1)..( 16): Result.005 file - promoters50/4283230
aagaaaaaataaatta

SEQ ID NO: 186632 - DNA, 16 bp, Unknown
  misc_feature (1)..( 16): Result.005 file - promoters50/4283230
atgggaaaataataat

SEQ ID NO: 186633 - DNA, 17 bp, Unknown
  misc_feature (1)..( 17): Result.005 file - promoters50/4283230
gatcaaaaatcaattgt

SEQ ID NO: 186634 - DNA, 17 bp, Unknown
  misc_feature (1)..( 17): Result.005 file - promoters50/4283230
ccactaaagtcacatcc

SEQ ID NO: 186635 - DNA, 17 bp, Unknown
  misc_feature (1)..( 17): Result.005 file - promoters50/4283230
aagaaaaaatgttaaag

SEQ ID NO: 186636 - DNA, 17 bp, Unknown
  misc_feature (1)..( 17): Result.005 file - promoters50/4283230
aggcttaatttaatcgg

SEQ ID NO: 186637 - DNA, 11 bp, Unknown
  misc_feature (1)..( 11): Result.005 file - promoters50/4283230
aaaaatcaatt

SEQ ID NO: 186638 - DNA, 11 bp, Unknown
  misc_feature (1)..( 11): Result.005 file - promoters50/4283230
aaaaatgttaa

SEQ ID NO: 186639 - DNA, 11 bp, Unknown
  misc_feature (1)..( 11): Result.005 file - promoters50/4283230
aaaaataaatt

SEQ ID NO: 186640 - DNA, 11 bp, Unknown
  misc_feature (1)..( 11): Result.005 file - promoters50/4283230
taaagtcacat

SEQ ID NO: 186641 - DNA, 11 bp, Unknown
  misc_feature (1)..( 11): Result.005 file - promoters50/4283230
cttaatttaat

SEQ ID NO: 186642 - DNA, 11 bp, Unknown
  misc_feature (1)..( 11): Result.005 file - promoters50/4283230
tttaattaatt

SEQ ID NO: 186643 - DNA, 12 bp, Unknown
  misc_feature (1)..( 12): Result.005 file - promoters50/4283240
ataaattgtagg

SEQ ID NO: 186644 - DNA, 12 bp, Unknown
  misc_feature (1)..( 12): Result.005 file - promoters50/4283240
caaaattgatat

SEQ ID NO: 186645 - DNA, 12 bp, Unknown
  misc_feature (1)..( 12): Result.005 file - promoters50/4283240
ataaattaatgc

SEQ ID NO: 186646 - DNA, 12 bp, Unknown
  misc_feature (1)..( 12): Result.005 file - promoters50/4283240
ttgaattgatat

SEQ ID NO: 186647 - DNA, 12 bp, Unknown
  misc_feature (1)..( 12): Result.005 file - promoters50/4283240
tgaaatattata

SEQ ID NO: 186648 - DNA, 12 bp, Unknown
  misc_feature (1)..( 12): Result.005 file - promoters50/4283240
tctatttgctat

SEQ ID NO: 186649 - DNA, 7 bp, Unknown
  misc_feature (1)..( 7): Result.005 file - promoters50/4283240
taattta

SEQ ID NO: 186650 - DNA, 7 bp, Unknown
  misc_feature (1)..( 7): Result.005 file - promoters50/4283240
taatttt

SEQ ID NO: 186651 - DNA, 7 bp, Unknown
  misc_feature (1)..( 7): Result.005 file - promoters50/4283240
aaattta

SEQ ID NO: 186652 - DNA, 7 bp, Unknown
  misc_feature (1)..( 7): Result.005 file - promoters50/4283240
taaatta

SEQ ID NO: 186653 - DNA, 7 bp, Unknown
  misc_feature (1)..( 7): Result.005 file - promoters50/4283240
gaaatta

SEQ ID NO: 186654 - DNA, 8 bp, Unknown
  misc_feature (1)..( 8): Result.005 file - promoters50/4283240
aaatcttg

SEQ ID NO: 186655 - DNA, 8 bp, Unknown
  misc_feature (1)..( 8): Result.005 file - promoters50/4283240
aaaccttt

SEQ ID NO: 186656 - DNA, 6 bp, Unknown
  misc_feature (1)..( 6): Result.005 file - promoters50/4283247
aattta

SEQ ID NO: 186657 - DNA, 6 bp, Unknown
  misc_feature (1)..( 6): Result.005 file - promoters50/4283247
aattta

SEQ ID NO: 186658 - DNA, 6 bp, Unknown
  misc_feature (1)..( 6): Result.005 file - promoters50/4283247
aattta

SEQ ID NO: 186659 - DNA, 8 bp, Unknown
  misc_feature (1)..( 8): Result.005 file - promoters50/4283247
gatttttg

SEQ ID NO: 186660 - DNA, 8 bp, Unknown
  misc_feature (1)..( 8): Result.005 file - promoters50/4283247
gatttttg

SEQ ID NO: 186661 - DNA, 8 bp, Unknown
  misc_feature (1)..( 8): Result.005 file - promoters50/4283247
tatttttg

SEQ ID NO: 186662 - DNA, 14 bp, Unknown
  misc_feature (1)..( 14): Result.005 file - promoters50/4283278
tttcaattttctcc

SEQ ID NO: 186663 - DNA, 14 bp, Unknown
  misc_feature (1)..( 14): Result.005 file - promoters50/4283278
gttaaattttgtag

SEQ ID NO: 186664 - DNA, 14 bp, Unknown
  misc_feature (1)..( 14): Result.005 file - promoters50/4283278
acatgattttgttt

SEQ ID NO: 186665 - DNA, 14 bp, Unknown
  misc_feature (1)..( 14): Result.005 file - promoters50/4283278
acatgattttattt

SEQ ID NO: 186666 - DNA, 14 bp, Unknown
  misc_feature (1)..( 14): Result.005 file - promoters50/4283278
cctatatttataaa

SEQ ID NO: 186667 - DNA, 10 bp, Unknown
  misc_feature (1)..( 10): Result.005 file - promoters50/4283278
tttcaatttt

SEQ ID NO: 186668 - DNA, 10 bp, Unknown
  misc_feature (1)..( 10): Result.005 file - promoters50/4283278
tttaaattat

SEQ ID NO: 186669 - DNA, 10 bp, Unknown
  misc_feature (1)..( 10): Result.005 file - promoters50/4283278
tttaaaagtg

SEQ ID NO: 186670 - DNA, 10 bp, Unknown
  misc_feature (1)..( 10): Result.005 file - promoters50/4283278
taaaaatatt

SEQ ID NO: 186671 - DNA, 10 bp, Unknown
  misc_feature (1)..( 10): Result.005 file - promoters50/4283278
tagaaacata

SEQ ID NO: 186672 - DNA, 10 bp, Unknown
  misc_feature (1)..( 10): Result.005 file - promoters50/4283282
acatttaaag

SEQ ID NO: 186673 - DNA, 10 bp, Unknown
  misc_feature (1)..( 10): Result.005 file - promoters50/4283282
ctttttaaag

SEQ ID NO: 186674 - DNA, 10 bp, Unknown
  misc_feature (1)..( 10): Result.005 file - promoters50/4283282
cttcttaaca

SEQ ID NO: 186675 - DNA, 7 bp, Unknown
  misc_feature (1)..( 7): Result.005 file - promoters50/4283293
tatttaa

SEQ ID NO: 186676 - DNA, 7 bp, Unknown
  misc_feature (1)..( 7): Result.005 file - promoters50/4283293
tatttaa

SEQ ID NO: 186677 - DNA, 7 bp, Unknown
  misc_feature (1)..( 7): Result.005 file - promoters50/4283293
aatttaa

SEQ ID NO: 186678 - DNA, 9 bp, Unknown
  misc_feature (1)..( 9): Result.005 file - promoters50/4283293
aaatagaat

SEQ ID NO: 186679 - DNA, 9 bp, Unknown
  misc_feature (1)..( 9): Result.005 file - promoters50/4283293
aaaaagaac

SEQ ID NO: 186680 - DNA, 9 bp, Unknown
  misc_feature (1)..( 9): Result.005 file - promoters50/4283293
ataaagaac

SEQ ID NO: 186681 - DNA, 10 bp, Unknown
  misc_feature (1)..( 10): Result.005 file - promoters50/4283297
agaaaatttt

SEQ ID NO: 186682 - DNA, 10 bp, Unknown
  misc_feature (1)..( 10): Result.005 file - promoters50/4283297
aaaaaattta

SEQ ID NO: 186683 - DNA, 10 bp, Unknown
  misc_feature (1)..( 10): Result.005 file - promoters50/4283297
catcaatttt

SEQ ID NO: 186684 - DNA, 10 bp, Unknown
  misc_feature (1)..( 10): Result.005 file - promoters50/4283297
aaacaattgg

SEQ ID NO: 186685 - DNA, 10 bp, Unknown
  misc_feature (1)..( 10): Result.005 file - promoters50/4283297
aaataataaa

SEQ ID NO: 186686 - DNA, 10 bp, Unknown
  misc_feature (1)..( 10): Result.005 file - promoters50/4283297
tatctattta

SEQ ID NO: 186687 - DNA, 12 bp, Unknown
  misc_feature (1)..( 12): Result.005 file - promoters50/4283309
aattaaaatata

SEQ ID NO: 186688 - DNA, 12 bp, Unknown
  misc_feature (1)..( 12): Result.005 file - promoters50/4283309
aataaaagtata

SEQ ID NO: 186689 - DNA, 12 bp, Unknown
  misc_feature (1)..( 12): Result.005 file - promoters50/4283309
gagaaaattatt

SEQ ID NO: 186690 - DNA, 8 bp, Unknown
  misc_feature (1)..( 8): Result.005 file - promoters50/4283309
aaagcaaa

SEQ ID NO: 186691 - DNA, 8 bp, Unknown
  misc_feature (1)..( 8): Result.005 file - promoters50/4283309
aaaccaat

SEQ ID NO: 186692 - DNA, 8 bp, Unknown
  misc_feature (1)..( 8): Result.005 file - promoters50/4283309
aaagcaaa

SEQ ID NO: 186693 - DNA, 7 bp, Unknown
  misc_feature (1)..( 7): Result.005 file - promoters50/4283309
ttcaaat

SEQ ID NO: 186694 - DNA, 7 bp, Unknown
  misc_feature (1)..( 7): Result.005 file - promoters50/4283309
atcaaat

SEQ ID NO: 186695 - DNA, 7 bp, Unknown
  misc_feature (1)..( 7): Result.005 file - promoters50/4283309
atcgaat

SEQ ID NO: 186696 - DNA, 8 bp, Unknown
  misc_feature (1)..( 8): Result.005 file - promoters50/4283315
tcacattc

SEQ ID NO: 186697 - DNA, 8 bp, Unknown
  misc_feature (1)..( 8): Result.005 file - promoters50/4283315
tcactttc

SEQ ID NO: 186698 - DNA, 8 bp, Unknown
  misc_feature (1)..( 8): Result.005 file - promoters50/4283315
agacattc

SEQ ID NO: 186699 - DNA, 11 bp, Unknown
  misc_feature (1)..( 11): Result.005 file - promoters50/4283338
tattaaatgag

SEQ ID NO: 186700 - DNA, 11 bp, Unknown
  misc_feature (1)..( 11): Result.005 file - promoters50/4283338
ttttaaatttt

SEQ ID NO: 186701 - DNA, 11 bp, Unknown
  misc_feature (1)..( 11): Result.005 file - promoters50/4283338
tatgaaaattc

SEQ ID NO: 186702 - DNA, 11 bp, Unknown
  misc_feature (1)..( 11): Result.005 file - promoters50/4283338
gggtaaatgct

SEQ ID NO: 186703 - DNA, 11 bp, Unknown
  misc_feature (1)..( 11): Result.005 file - promoters50/4283338
tagaaaaagct

SEQ ID NO: 186704 - DNA, 11 bp, Unknown
  misc_feature (1)..( 11): Result.005 file - promoters50/4283338
gtgtaaatctt

SEQ ID NO: 186705 - DNA, 8 bp, Unknown
  misc_feature (1)..( 8): Result.005 file - promoters50/4283347
ataaaaat

SEQ ID NO: 186706 - DNA, 8 bp, Unknown
  misc_feature (1)..( 8): Result.005 file - promoters50/4283347
gtaaaaat

SEQ ID NO: 186707 - DNA, 8 bp, Unknown
  misc_feature (1)..( 8): Result.005 file - promoters50/4283347
atacaaat

SEQ ID NO: 186708 - DNA, 8 bp, Unknown
  misc_feature (1)..( 8): Result.005 file - promoters50/4283347
tactgtta

SEQ ID NO: 186709 - DNA, 8 bp, Unknown
  misc_feature (1)..( 8): Result.005 file - promoters50/4283347
tactgtta

SEQ ID NO: 186710 - DNA, 8 bp, Unknown
  misc_feature (1)..( 8): Result.005 file - promoters50/4283347
ctctgtta

SEQ ID NO: 186711 - DNA, 8 bp, Unknown
  misc_feature (1)..( 8): Result.005 file - promoters50/4283347
atctgttc

SEQ ID NO: 186712 - DNA, 9 bp, Unknown
  misc_feature (1)..( 9): Result.005 file - promoters50/4283347
aattcgtac

SEQ ID NO: 186713 - DNA, 9 bp, Unknown
  misc_feature (1)..( 9): Result.005 file - promoters50/4283347
aattggtaa

SEQ ID NO: 186714 - DNA, 9 bp, Unknown
  misc_feature (1)..( 9): Result.005 file - promoters50/4283347
aattcatac

SEQ ID NO: 186715 - DNA, 8 bp, Unknown
  misc_feature (1)..( 8): Result.005 file - promoters50/4283355
caaagaaa

SEQ ID NO: 186716 - DNA, 8 bp, Unknown
  misc_feature (1)..( 8): Result.005 file - promoters50/4283355
caaacaaa

SEQ ID NO: 186717 - DNA, 8 bp, Unknown
  misc_feature (1)..( 8): Result.005 file - promoters50/4283355
agaagaaa

SEQ ID NO: 186718 - DNA, 8 bp, Unknown
  misc_feature (1)..( 8): Result.005 file - promoters50/4283355
aaaacaaa

SEQ ID NO: 186719 - DNA, 8 bp, Unknown
  misc_feature (1)..( 8): Result.005 file - promoters50/4283355
aaaaccaa

SEQ ID NO: 186720 - DNA, 8 bp, Unknown
  misc_feature (1)..( 8): Result.005 file - promoters50/4283355
gaaaaaat

SEQ ID NO: 186721 - DNA, 16 bp, Unknown
  misc_feature (1)..( 16): Result.005 file - promoters50/4283358
cataacactttgtaaa

SEQ ID NO: 186722 - DNA, 16 bp, Unknown
  misc_feature (1)..( 16): Result.005 file - promoters50/4283358
ttatattttttataaa

SEQ ID NO: 186723 - DNA, 16 bp, Unknown
  misc_feature (1)..( 16): Result.005 file - promoters50/4283358
ttatatgttttatttg

SEQ ID NO: 186724 - DNA, 13 bp, Unknown
  misc_feature (1)..( 13): Result.005 file - promoters50/4283358
cgttgttttttcc

SEQ ID NO: 186725 - DNA, 13 bp, Unknown
  misc_feature (1)..( 13): Result.005 file - promoters50/4283358
ttatattttttat

SEQ ID NO: 186726 - DNA, 13 bp, Unknown
  misc_feature (1)..( 13): Result.005 file - promoters50/4283358
ttatatgttttat

SEQ ID NO: 186727 - DNA, 9 bp, Unknown
  misc_feature (1)..( 9): Result.005 file - promoters50/4283378
gatgtataa

SEQ ID NO: 186728 - DNA, 9 bp, Unknown
  misc_feature (1)..( 9): Result.005 file - promoters50/4283378
aatgtatat

SEQ ID NO: 186729 - DNA, 9 bp, Unknown
  misc_feature (1)..( 9): Result.005 file - promoters50/4283378
aatgtaaaa

SEQ ID NO: 186730 - DNA, 9 bp, Unknown
  misc_feature (1)..( 9): Result.005 file - promoters50/4283378
gatgtataa

SEQ ID NO: 186731 - DNA, 9 bp, Unknown
  misc_feature (1)..( 9): Result.005 file - promoters50/4283378
aatgtaatt

SEQ ID NO: 186732 - DNA, 9 bp, Unknown
  misc_feature (1)..( 9): Result.005 file - promoters50/4283378
taagtataa

SEQ ID NO: 186733 - DNA, 12 bp, Unknown
  misc_feature (1)..( 12): Result.005 file - promoters50/4283378
tttaatttcgtt

SEQ ID NO: 186734 - DNA, 12 bp, Unknown
  misc_feature (1)..( 12): Result.005 file - promoters50/4283378
gttattttgcga

SEQ ID NO: 186735 - DNA, 12 bp, Unknown
  misc_feature (1)..( 12): Result.005 file - promoters50/4283378
tgtaatttagta

SEQ ID NO: 186736 - DNA, 12 bp, Unknown
  misc_feature (1)..( 12): Result.005 file - promoters50/4283378
acaaatttcaca

SEQ ID NO: 186737 - DNA, 12 bp, Unknown
  misc_feature (1)..( 12): Result.005 file - promoters50/4283378
ttttatttcata

SEQ ID NO: 186738 - DNA, 12 bp, Unknown
  misc_feature (1)..( 12): Result.005 file - promoters50/4283378
tttaatttcgtt

SEQ ID NO: 186739 - DNA, 12 bp, Unknown
  misc_feature (1)..( 12): Result.005 file - promoters50/4283378
ttacatttaaca

SEQ ID NO: 186740 - DNA, 11 bp, Unknown
  misc_feature (1)..( 11): Result.005 file - promoters50/4283378
gtatataaatg

SEQ ID NO: 186741 - DNA, 11 bp, Unknown
  misc_feature (1)..( 11): Result.005 file - promoters50/4283378
atatataataa

SEQ ID NO: 186742 - DNA, 11 bp, Unknown
  misc_feature (1)..( 11): Result.005 file - promoters50/4283378
acctataaata

SEQ ID NO: 186743 - DNA, 11 bp, Unknown
  misc_feature (1)..( 11): Result.005 file - promoters50/4283378
ctttataaata

SEQ ID NO: 186744 - DNA, 11 bp, Unknown
  misc_feature (1)..( 11): Result.005 file - promoters50/4283378
gtatataaact

SEQ ID NO: 186745 - DNA, 11 bp, Unknown
  misc_feature (1)..( 11): Result.005 file - promoters50/4283378
cgctataaaaa

SEQ ID NO: 186746 - DNA, 11 bp, Unknown
  misc_feature (1)..( 11): Result.005 file - promoters50/4283378
gtatataaatg

SEQ ID NO: 186747 - DNA, 11 bp, Unknown
  misc_feature (1)..( 11): Result.005 file - promoters50/4283378
ccccataaaag

SEQ ID NO: 186748 - DNA, 15 bp, Unknown
  misc_feature (1)..( 15): Result.005 file - promoters50/4283378
ataactttatgttat

SEQ ID NO: 186749 - DNA, 15 bp, Unknown
  misc_feature (1)..( 15): Result.005 file - promoters50/4283378
atatctttataagta

SEQ ID NO: 186750 - DNA, 15 bp, Unknown
  misc_feature (1)..( 15): Result.005 file - promoters50/4283378
gtaacttcaggctaa

SEQ ID NO: 186751 - DNA, 15 bp, Unknown
  misc_feature (1)..( 15): Result.005 file - promoters50/4283378
tacgttttaaaagta

SEQ ID NO: 186752 - DNA, 15 bp, Unknown
  misc_feature (1)..( 15): Result.005 file - promoters50/4283378
caatttttaaatttt

SEQ ID NO: 186753 - DNA, 15 bp, Unknown
  misc_feature (1)..( 15): Result.005 file - promoters50/4283378
ctcgcttcataacaa

SEQ ID NO: 186754 - DNA, 15 bp, Unknown
  misc_feature (1)..( 15): Result.005 file - promoters50/4283378
ataactttatgttat

SEQ ID NO: 186755 - DNA, 15 bp, Unknown
  misc_feature (1)..( 15): Result.005 file - promoters50/4283378
atattattatttctc

SEQ ID NO: 186756 - DNA, 12 bp, Unknown
  misc_feature (1)..( 12): Result.005 file - promoters50/4283378
atgttattagtt

SEQ ID NO: 186757 - DNA, 12 bp, Unknown
  misc_feature (1)..( 12): Result.005 file - promoters50/4283378
tctttataagta

SEQ ID NO: 186758 - DNA, 12 bp, Unknown
  misc_feature (1)..( 12): Result.005 file - promoters50/4283378
atgatattatta

SEQ ID NO: 186759 - DNA, 12 bp, Unknown
  misc_feature (1)..( 12): Result.005 file - promoters50/4283378
gttttaaaagta

SEQ ID NO: 186760 - DNA, 12 bp, Unknown
  misc_feature (1)..( 12): Result.005 file - promoters50/4283378
aatttttaaatt

SEQ ID NO: 186761 - DNA, 12 bp, Unknown
  misc_feature (1)..( 12): Result.005 file - promoters50/4283378
gcttcataacaa

SEQ ID NO: 186762 - DNA, 12 bp, Unknown
  misc_feature (1)..( 12): Result.005 file - promoters50/4283378
atgttattagtt

SEQ ID NO: 186763 - DNA, 12 bp, Unknown
  misc_feature (1)..( 12): Result.005 file - promoters50/4283378
aatttgtaactt

SEQ ID NO: 186764 - DNA, 13 bp, Unknown
  misc_feature (1)..( 13): Result.005 file - promoters50/4283378
aaataattttgtt

SEQ ID NO: 186765 - DNA, 13 bp, Unknown
  misc_feature (1)..( 13): Result.005 file - promoters50/4283378
gtataattgttaa

SEQ ID NO: 186766 - DNA, 13 bp, Unknown
  misc_feature (1)..( 13): Result.005 file - promoters50/4283378
aaacaatttttaa

SEQ ID NO: 186767 - DNA, 13 bp, Unknown
  misc_feature (1)..( 13): Result.005 file - promoters50/4283378
ggctaaatttgtt

SEQ ID NO: 186768 - DNA, 13 bp, Unknown
  misc_feature (1)..( 13): Result.005 file - promoters50/4283378
atattattatttc

SEQ ID NO: 186769 - DNA, 13 bp, Unknown
  misc_feature (1)..( 13): Result.005 file - promoters50/4283378
ttcgaaatttcct

SEQ ID NO: 186770 - DNA, 13 bp, Unknown
  misc_feature (1)..( 13): Result.005 file - promoters50/4283378
atgttattagtta

SEQ ID NO: 186771 - DNA, 9 bp, Unknown
  misc_feature (1)..( 9): Result.005 file - promoters50/4283378
gttttattt

SEQ ID NO: 186772 - DNA, 9 bp, Unknown
  misc_feature (1)..( 9): Result.005 file - promoters50/4283378
ttttgattc

SEQ ID NO: 186773 - DNA, 9 bp, Unknown
  misc_feature (1)..( 9): Result.005 file - promoters50/4283378
attttgttt

SEQ ID NO: 186774 - DNA, 9 bp, Unknown
  misc_feature (1)..( 9): Result.005 file - promoters50/4283378
attttgaaa

SEQ ID NO: 186775 - DNA, 9 bp, Unknown
  misc_feature (1)..( 9): Result.005 file - promoters50/4283378
tttttaaaa

SEQ ID NO: 186776 - DNA, 9 bp, Unknown
  misc_feature (1)..( 9): Result.005 file - promoters50/4283378
atttgaaaa

SEQ ID NO: 186777 - DNA, 15 bp, Unknown
  misc_feature (1)..( 15): Result.005 file - promoters50/4283378
ttgtgttaaatatga

SEQ ID NO: 186778 - DNA, 15 bp, Unknown
  misc_feature (1)..( 15): Result.005 file - promoters50/4283378
gattctaaaatattg

SEQ ID NO: 186779 - DNA, 16 bp, Unknown
  misc_feature (1)..( 16): Result.005 file - promoters50/4283378
aattttaaaattattc

SEQ ID NO: 186780 - DNA, 17 bp, Unknown
  misc_feature (1)..( 17): Result.005 file - promoters50/4283378
agaaactaagattataa

SEQ ID NO: 186781 - DNA, 17 bp, Unknown
  misc_feature (1)..( 17): Result.005 file - promoters50/4283378
accattgtgaaataatt

SEQ ID NO: 186782 - DNA, 17 bp, Unknown
  misc_feature (1)..( 17): Result.005 file - promoters50/4283378
taaattttgaaataatt

SEQ ID NO: 186783 - DNA, 17 bp, Unknown
  misc_feature (1)..( 17): Result.005 file - promoters50/4283378
aattttttaaaatatat

SEQ ID NO: 186784 - DNA, 17 bp, Unknown
  misc_feature (1)..( 17): Result.005 file - promoters50/4283378
aaatctgagaaatagat

SEQ ID NO: 186785 - DNA, 12 bp, Unknown
  misc_feature (1)..( 12): Result.005 file - promoters50/4283378
gatgatttaatt

SEQ ID NO: 186786 - DNA, 12 bp, Unknown
  misc_feature (1)..( 12): Result.005 file - promoters50/4283378
ttacatttaaca

SEQ ID NO: 186787 - DNA, 12 bp, Unknown
  misc_feature (1)..( 12): Result.005 file - promoters50/4283378
ttttatttcata

SEQ ID NO: 186788 - DNA, 12 bp, Unknown
  misc_feature (1)..( 12): Result.005 file - promoters50/4283378
acaaatttcaca

SEQ ID NO: 186789 - DNA, 12 bp, Unknown
  misc_feature (1)..( 12): Result.005 file - promoters50/4283378
gatgatttaatt

SEQ ID NO: 186790 - DNA, 12 bp, Unknown
  misc_feature (1)..( 12): Result.005 file - promoters50/4283378
aattattttcga

SEQ ID NO: 186791 - DNA, 10 bp, Unknown
  misc_feature (1)..( 10): Result.005 file - promoters50/4283378
ataattttgt

SEQ ID NO: 186792 - DNA, 10 bp, Unknown
  misc_feature (1)..( 10): Result.005 file - promoters50/4283378
taaatttttt

SEQ ID NO: 186793 - DNA, 10 bp, Unknown
  misc_feature (1)..( 10): Result.005 file - promoters50/4283378
taaatttgtt

SEQ ID NO: 186794 - DNA, 10 bp, Unknown
  misc_feature (1)..( 10): Result.005 file - promoters50/4283378
ttaatctttt

SEQ ID NO: 186795 - DNA, 10 bp, Unknown
  misc_feature (1)..( 10): Result.005 file - promoters50/4283378
gaaatttcct

SEQ ID NO: 186796 - DNA, 10 bp, Unknown
  misc_feature (1)..( 10): Result.005 file - promoters50/4283378
attattattt

SEQ ID NO: 186797 - DNA, 10 bp, Unknown
  misc_feature (1)..( 10): Result.005 file - promoters50/4283378
taactttatg

SEQ ID NO: 186798 - DNA, 8 bp, Unknown
  misc_feature (1)..( 8): Result.005 file - promoters50/4283378
tgaaaaga

SEQ ID NO: 186799 - DNA, 8 bp, Unknown
  misc_feature (1)..( 8): Result.005 file - promoters50/4283378
tgaaaatt

SEQ ID NO: 186800 - DNA, 8 bp, Unknown
  misc_feature (1)..( 8): Result.005 file - promoters50/4283378
tgaaaagg

SEQ ID NO: 186801 - DNA, 8 bp, Unknown
  misc_feature (1)..( 8): Result.005 file - promoters50/4283378
cgaaaatt

SEQ ID NO: 186802 - DNA, 8 bp, Unknown
  misc_feature (1)..( 8): Result.005 file - promoters50/4283378
ccaaaatt

SEQ ID NO: 186803 - DNA, 8 bp, Unknown
  misc_feature (1)..( 8): Result.005 file - promoters50/4283378
tgaaaaga

SEQ ID NO: 186804 - DNA, 18 bp, Unknown
  misc_feature (1)..( 18): Result.005 file - promoters50/4283378
ataaattttaaaattatt

SEQ ID NO: 186805 - DNA, 18 bp, Unknown
  misc_feature (1)..( 18): Result.005 file - promoters50/4283378
tttgattctaaaatattg

SEQ ID NO: 186806 - DNA, 18 bp, Unknown
  misc_feature (1)..( 18): Result.005 file - promoters50/4283378
atagatttgaaaaacaga

SEQ ID NO: 186807 - DNA, 18 bp, Unknown
  misc_feature (1)..( 18): Result.005 file - promoters50/4283378
gcagaaactaagattata

SEQ ID NO: 186808 - DNA, 18 bp, Unknown
  misc_feature (1)..( 18): Result.005 file - promoters50/4283378
aataattttgttttattt

SEQ ID NO: 186809 - DNA, 18 bp, Unknown
  misc_feature (1)..( 18): Result.005 file - promoters50/4283378
gtaaattttgaaataatt

SEQ ID NO: 186810 - DNA, 18 bp, Unknown
  misc_feature (1)..( 18): Result.005 file - promoters50/4283378
aaattttttaaaatatat

SEQ ID NO: 186811 - DNA, 13 bp, Unknown
  misc_feature (1)..( 13): Result.005 file - promoters50/4283378
atgataaacctga

SEQ ID NO: 186812 - DNA, 13 bp, Unknown
  misc_feature (1)..( 13): Result.005 file - promoters50/4283378
gaacaaaaccttg

SEQ ID NO: 186813 - DNA, 13 bp, Unknown
  misc_feature (1)..( 13): Result.005 file - promoters50/4283378
gattcaaaccctt

SEQ ID NO: 186814 - DNA, 14 bp, Unknown
  misc_feature (1)..( 14): Result.005 file - promoters50/4283378
gatttaaagcctga

SEQ ID NO: 186815 - DNA, 14 bp, Unknown
  misc_feature (1)..( 14): Result.005 file - promoters50/4283378
gtaagaaatcctcc

SEQ ID NO: 186816 - DNA, 14 bp, Unknown
  misc_feature (1)..( 14): Result.005 file - promoters50/4283378
gatgtgaagcctaa

SEQ ID NO: 186817 - DNA, 9 bp, Unknown
  misc_feature (1)..( 9): Result.005 file - promoters50/4283378
atattatac

SEQ ID NO: 186818 - DNA, 9 bp, Unknown
  misc_feature (1)..( 9): Result.005 file - promoters50/4283378
ttattattt

SEQ ID NO: 186819 - DNA, 9 bp, Unknown
  misc_feature (1)..( 9): Result.005 file - promoters50/4283378
gtataattg

SEQ ID NO: 186820 - DNA, 9 bp, Unknown
  misc_feature (1)..( 9): Result.005 file - promoters50/4283378
gtataactt

SEQ ID NO: 186821 - DNA, 9 bp, Unknown
  misc_feature (1)..( 9): Result.005 file - promoters50/4283378
aaatttttt

SEQ ID NO: 186822 - DNA, 9 bp, Unknown
  misc_feature (1)..( 9): Result.005 file - promoters50/4283378
gtaaatttt

SEQ ID NO: 186823 - DNA, 8 bp, Unknown
  misc_feature (1)..( 8): Result.005 file - promoters50/4283390
tctaaatt

SEQ ID NO: 186824 - DNA, 8 bp, Unknown
  misc_feature (1)..( 8): Result.005 file - promoters50/4283390
aataaatt

SEQ ID NO: 186825 - DNA, 8 bp, Unknown
  misc_feature (1)..( 8): Result.005 file - promoters50/4283390
aatagatt

SEQ ID NO: 186826 - DNA, 9 bp, Unknown
  misc_feature (1)..( 9): Result.005 file - promoters50/4283394
tatgtcttt

SEQ ID NO: 186827 - DNA, 9 bp, Unknown
  misc_feature (1)..( 9): Result.005 file - promoters50/4283394
tatatctgt

SEQ ID NO: 186828 - DNA, 9 bp, Unknown
  misc_feature (1)..( 9): Result.005 file - promoters50/4283394
tgtgtttga

SEQ ID NO: 186829 - DNA, 11 bp, Unknown
  misc_feature (1)..( 11): Result.005 file - promoters50/4283394
aaccattatta

SEQ ID NO: 186830 - DNA, 11 bp, Unknown
  misc_feature (1)..( 11): Result.005 file - promoters50/4283394
actgattttta

SEQ ID NO: 186831 - DNA, 11 bp, Unknown
  misc_feature (1)..( 11): Result.005 file - promoters50/4283394
actgagtttag

SEQ ID NO: 186832 - DNA, 9 bp, Unknown
  misc_feature (1)..( 9): Result.005 file - promoters50/4283397
attttaata

SEQ ID NO: 186833 - DNA, 9 bp, Unknown
  misc_feature (1)..( 9): Result.005 file - promoters50/4283397
attataaat

SEQ ID NO: 186834 - DNA, 9 bp, Unknown
  misc_feature (1)..( 9): Result.005 file - promoters50/4283397
catttaata

SEQ ID NO: 186835 - DNA, 9 bp, Unknown
  misc_feature (1)..( 9): Result.005 file - promoters50/4283397
attttaagc

SEQ ID NO: 186836 - DNA, 8 bp, Unknown
  misc_feature (1)..( 8): Result.005 file - promoters50/4283397
aatcaaaa

SEQ ID NO: 186837 - DNA, 8 bp, Unknown
  misc_feature (1)..( 8): Result.005 file - promoters50/4283397
aatcaatt

SEQ ID NO: 186838 - DNA, 8 bp, Unknown
  misc_feature (1)..( 8): Result.005 file - promoters50/4283397
aataaatt

SEQ ID NO: 186839 - DNA, 7 bp, Unknown
  misc_feature (1)..( 7): Result.005 file - promoters50/4283397
aaatttt

SEQ ID NO: 186840 - DNA, 7 bp, Unknown
  misc_feature (1)..( 7): Result.005 file - promoters50/4283397
gaatttt

SEQ ID NO: 186841 - DNA, 7 bp, Unknown
  misc_feature (1)..( 7): Result.005 file - promoters50/4283397
aaatttg

SEQ ID NO: 186842 - DNA, 11 bp, Unknown
  misc_feature (1)..( 11): Result.005 file - promoters50/4283397
aaacaaaattt

SEQ ID NO: 186843 - DNA, 11 bp, Unknown
  misc_feature (1)..( 11): Result.005 file - promoters50/4283397
aaaaaaaattt

SEQ ID NO: 186844 - DNA, 11 bp, Unknown
  misc_feature (1)..( 11): Result.005 file - promoters50/4283397
ccacaaaaaac

SEQ ID NO: 186845 - DNA, 10 bp, Unknown
  misc_feature (1)..( 10): Result.005 file - promoters50/4283397
aataataaaa

SEQ ID NO: 186846 - DNA, 10 bp, Unknown
  misc_feature (1)..( 10): Result.005 file - promoters50/4283397
aataaaaaaa

SEQ ID NO: 186847 - DNA, 10 bp, Unknown
  misc_feature (1)..( 10): Result.005 file - promoters50/4283397
cacaaaaaac

SEQ ID NO: 186848 - DNA, 10 bp, Unknown
  misc_feature (1)..( 10): Result.005 file - promoters50/4283397
cggaaaaaag

SEQ ID NO: 186849 - DNA, 7 bp, Unknown
  misc_feature (1)..( 7): Result.005 file - promoters50/4283397
aatttta

SEQ ID NO: 186850 - DNA, 7 bp, Unknown
  misc_feature (1)..( 7): Result.005 file - promoters50/4283397
aattttc

SEQ ID NO: 186851 - DNA, 7 bp, Unknown
  misc_feature (1)..( 7): Result.005 file - promoters50/4283397
cattttc

SEQ ID NO: 186852 - DNA, 10 bp, Unknown
  misc_feature (1)..( 10): Result.005 file - promoters50/4283397
ttttacaaaa

SEQ ID NO: 186853 - DNA, 10 bp, Unknown
  misc_feature (1)..( 10): Result.005 file - promoters50/4283397
attttcaaaa

SEQ ID NO: 186854 - DNA, 10 bp, Unknown
  misc_feature (1)..( 10): Result.005 file - promoters50/4283397
attttctttc

SEQ ID NO: 186855 - DNA, 9 bp, Unknown
  misc_feature (1)..( 9): Result.005 file - promoters50/4283397
aacaaaatt

SEQ ID NO: 186856 - DNA, 9 bp, Unknown
  misc_feature (1)..( 9): Result.005 file - promoters50/4283397
aacaaaaaa

SEQ ID NO: 186857 - DNA, 9 bp, Unknown
  misc_feature (1)..( 9): Result.005 file - promoters50/4283397
cacaaaaaa

SEQ ID NO: 186858 - DNA, 8 bp, Unknown
  misc_feature (1)..( 8): Result.005 file - promoters50/4283397
aaaataga

SEQ ID NO: 186859 - DNA, 8 bp, Unknown
  misc_feature (1)..( 8): Result.005 file - promoters50/4283397
aaaaaaga

SEQ ID NO: 186860 - DNA, 8 bp, Unknown
  misc_feature (1)..( 8): Result.005 file - promoters50/4283397
caaagagt

SEQ ID NO: 186861 - DNA, 10 bp, Unknown
  misc_feature (1)..( 10): Result.005 file - promoters50/4283397
aaaaaataaa

SEQ ID NO: 186862 - DNA, 10 bp, Unknown
  misc_feature (1)..( 10): Result.005 file - promoters50/4283397
aaaaaacaaa

SEQ ID NO: 186863 - DNA, 10 bp, Unknown
  misc_feature (1)..( 10): Result.005 file - promoters50/4283397
tatatagaaa

SEQ ID NO: 186864 - DNA, 8 bp, Unknown
  misc_feature (1)..( 8): Result.005 file - promoters50/4283422
aataattt

SEQ ID NO: 186865 - DNA, 8 bp, Unknown
  misc_feature (1)..( 8): Result.005 file - promoters50/4283422
catatttt

SEQ ID NO: 186866 - DNA, 8 bp, Unknown
  misc_feature (1)..( 8): Result.005 file - promoters50/4283422
aatatgtg

SEQ ID NO: 186867 - DNA, 10 bp, Unknown
  misc_feature (1)..( 10): Result.005 file - promoters50/4283422
aaactataga

SEQ ID NO: 186868 - DNA, 10 bp, Unknown
  misc_feature (1)..( 10): Result.005 file - promoters50/4283422
aaactataga

SEQ ID NO: 186869 - DNA, 10 bp, Unknown
  misc_feature (1)..( 10): Result.005 file - promoters50/4283422
taactatttg

SEQ ID NO: 186870 - DNA, 9 bp, Unknown
  misc_feature (1)..( 9): Result.005 file - promoters50/4283422
ttaaatgat

SEQ ID NO: 186871 - DNA, 9 bp, Unknown
  misc_feature (1)..( 9): Result.005 file - promoters50/4283422
ataaatgat

SEQ ID NO: 186872 - DNA, 9 bp, Unknown
  misc_feature (1)..( 9): Result.005 file - promoters50/4283422
ataaatata

SEQ ID NO: 186873 - DNA, 8 bp, Unknown
  misc_feature (1)..( 8): Result.005 file - promoters50/4283425
ccaaaaaa

SEQ ID NO: 186874 - DNA, 8 bp, Unknown
  misc_feature (1)..( 8): Result.005 file - promoters50/4283425
ggaaaaaa

SEQ ID NO: 186875 - DNA, 8 bp, Unknown
  misc_feature (1)..( 8): Result.005 file - promoters50/4283425
ccaaaaat

SEQ ID NO: 186876 - DNA, 10 bp, Unknown
  misc_feature (1)..( 10): Result.005 file - promoters50/4283425
tatatatata

SEQ ID NO: 186877 - DNA, 10 bp, Unknown
  misc_feature (1)..( 10): Result.005 file - promoters50/4283425
tataaatata

SEQ ID NO: 186878 - DNA, 11 bp, Unknown
  misc_feature (1)..( 11): Result.005 file - promoters50/4283425
tataatatctc

SEQ ID NO: 186879 - DNA, 9 bp, Unknown
  misc_feature (1)..( 9): Result.005 file - promoters50/4283425
agtcttaag

SEQ ID NO: 186880 - DNA, 9 bp, Unknown
  misc_feature (1)..( 9): Result.005 file - promoters50/4283425
ggtctaaag

SEQ ID NO: 186881 - DNA, 9 bp, Unknown
  misc_feature (1)..( 9): Result.005 file - promoters50/4283425
ggtcaaaaa

SEQ ID NO: 186882 - DNA, 8 bp, Unknown
  misc_feature (1)..( 8): Result.005 file - promoters50/4283433
cttcttaa

SEQ ID NO: 186883 - DNA, 8 bp, Unknown
  misc_feature (1)..( 8): Result.005 file - promoters50/4283433
cttgttaa

SEQ ID NO: 186884 - DNA, 8 bp, Unknown
  misc_feature (1)..( 8): Result.005 file - promoters50/4283433
tttcttat

SEQ ID NO: 186885 - DNA, 12 bp, Unknown
  misc_feature (1)..( 12): Result.005 file - promoters50/4283433
tttttggagaac

SEQ ID NO: 186886 - DNA, 12 bp, Unknown
  misc_feature (1)..( 12): Result.005 file - promoters50/4283433
attttgaagaac

SEQ ID NO: 186887 - DNA, 12 bp, Unknown
  misc_feature (1)..( 12): Result.005 file - promoters50/4283433
attttgattttg

SEQ ID NO: 186888 - DNA, 9 bp, Unknown
  misc_feature (1)..( 9): Result.005 file - promoters50/4283441
tcagtatcg

SEQ ID NO: 186889 - DNA, 9 bp, Unknown
  misc_feature (1)..( 9): Result.005 file - promoters50/4283441
tcattatgt

SEQ ID NO: 186890 - DNA, 9 bp, Unknown
  misc_feature (1)..( 9): Result.005 file - promoters50/4283441
taattttgt

SEQ ID NO: 186891 - DNA, 12 bp, Unknown
  misc_feature (1)..( 12): Result.005 file - promoters50/4283441
actatataaaat

SEQ ID NO: 186892 - DNA, 12 bp, Unknown
  misc_feature (1)..( 12): Result.005 file - promoters50/4283441
actttataaaat

SEQ ID NO: 186893 - DNA, 12 bp, Unknown
  misc_feature (1)..( 12): Result.005 file - promoters50/4283441
tgtttataaatc

SEQ ID NO: 186894 - DNA, 10 bp, Unknown
  misc_feature (1)..( 10): Result.005 file - promoters50/4283441
aattatttca

SEQ ID NO: 186895 - DNA, 10 bp, Unknown
  misc_feature (1)..( 10): Result.005 file - promoters50/4283441
aataattcat

SEQ ID NO: 186896 - DNA, 10 bp, Unknown
  misc_feature (1)..( 10): Result.005 file - promoters50/4283441
ggttatgtca

SEQ ID NO: 186897 - DNA, 8 bp, Unknown
  misc_feature (1)..( 8): Result.005 file - promoters50/4283445
ataatgtt

SEQ ID NO: 186898 - DNA, 8 bp, Unknown
  misc_feature (1)..( 8): Result.005 file - promoters50/4283445
atattgta

SEQ ID NO: 186899 - DNA, 8 bp, Unknown
  misc_feature (1)..( 8): Result.005 file - promoters50/4283445
ctaaggtt

SEQ ID NO: 186900 - DNA, 9 bp, Unknown
  misc_feature (1)..( 9): Result.005 file - promoters50/4283453
catgtacta

SEQ ID NO: 186901 - DNA, 9 bp, Unknown
  misc_feature (1)..( 9): Result.005 file - promoters50/4283453
catgttcta

SEQ ID NO: 186902 - DNA, 9 bp, Unknown
  misc_feature (1)..( 9): Result.005 file - promoters50/4283453
cattttcag

SEQ ID NO: 186903 - DNA, 9 bp, Unknown
  misc_feature (1)..( 9): Result.005 file - promoters50/4283453
cgtcaaatt

SEQ ID NO: 186904 - DNA, 9 bp, Unknown
  misc_feature (1)..( 9): Result.005 file - promoters50/4283453
cgtcaaaaa

SEQ ID NO: 186905 - DNA, 9 bp, Unknown
  misc_feature (1)..( 9): Result.005 file - promoters50/4283453
attcaaaaa

SEQ ID NO: 186906 - DNA, 9 bp, Unknown
  misc_feature (1)..( 9): Result.005 file - promoters50/4283453
gtttgcaaa

SEQ ID NO: 186907 - DNA, 9 bp, Unknown
  misc_feature (1)..( 9): Result.005 file - promoters50/4283453
atttccaaa

SEQ ID NO: 186908 - DNA, 9 bp, Unknown
  misc_feature (1)..( 9): Result.005 file - promoters50/4283453
attaccatt

SEQ ID NO: 186909 - DNA, 10 bp, Unknown
  misc_feature (1)..( 10): Result.005 file - promoters50/4283476
gtttgattta

SEQ ID NO: 186910 - DNA, 10 bp, Unknown
  misc_feature (1)..( 10): Result.005 file - promoters50/4283476
gtttgagatt

SEQ ID NO: 186911 - DNA, 10 bp, Unknown
  misc_feature (1)..( 10): Result.005 file - promoters50/4283476
cttttattta

SEQ ID NO: 186912 - DNA, 8 bp, Unknown
  misc_feature (1)..( 8): Result.005 file - promoters50/4283482
ttctcagt

SEQ ID NO: 186913 - DNA, 8 bp, Unknown
  misc_feature (1)..( 8): Result.005 file - promoters50/4283482
ttctcaca

SEQ ID NO: 186914 - DNA, 8 bp, Unknown
  misc_feature (1)..( 8): Result.005 file - promoters50/4283482
ttctaagt

SEQ ID NO: 186915 - DNA, 13 bp, Unknown
  misc_feature (1)..( 13): Result.005 file - promoters50/4283522
catacattttact

SEQ ID NO: 186916 - DNA, 13 bp, Unknown
  misc_feature (1)..( 13): Result.005 file - promoters50/4283522
tgagcattttact

SEQ ID NO: 186917 - DNA, 13 bp, Unknown
  misc_feature (1)..( 13): Result.005 file - promoters50/4283522
ttcaacttttacc

SEQ ID NO: 186918 - DNA, 13 bp, Unknown
  misc_feature (1)..( 13): Result.005 file - promoters50/4283522
catagatttgtta

SEQ ID NO: 186919 - DNA, 8 bp, Unknown
  misc_feature (1)..( 8): Result.005 file - promoters50/4283522
aatgaaaa

SEQ ID NO: 186920 - DNA, 8 bp, Unknown
  misc_feature (1)..( 8): Result.005 file - promoters50/4283522
tatgtaaa

SEQ ID NO: 186921 - DNA, 8 bp, Unknown
  misc_feature (1)..( 8): Result.005 file - promoters50/4283522
aattaaaa

SEQ ID NO: 186922 - DNA, 8 bp, Unknown
  misc_feature (1)..( 8): Result.005 file - promoters50/4283522
tatttaaa

SEQ ID NO: 186923 - DNA, 9 bp, Unknown
  misc_feature (1)..( 9): Result.005 file - promoters50/4283522
cttctctct

SEQ ID NO: 186924 - DNA, 9 bp, Unknown
  misc_feature (1)..( 9): Result.005 file - promoters50/4283522
cttttctat

SEQ ID NO: 186925 - DNA, 9 bp, Unknown
  misc_feature (1)..( 9): Result.005 file - promoters50/4283522
aatttctat

SEQ ID NO: 186926 - DNA, 9 bp, Unknown
  misc_feature (1)..( 9): Result.005 file - promoters50/4283522
cctttatat

SEQ ID NO: 186927 - DNA, 7 bp, Unknown
  misc_feature (1)..( 7): Result.005 file - promoters50/4283522
attctat

SEQ ID NO: 186928 - DNA, 7 bp, Unknown
  misc_feature (1)..( 7): Result.005 file - promoters50/4283522
tttctat

SEQ ID NO: 186929 - DNA, 7 bp, Unknown
  misc_feature (1)..( 7): Result.005 file - promoters50/4283522
tttctat

SEQ ID NO: 186930 - DNA, 7 bp, Unknown
  misc_feature (1)..( 7): Result.005 file - promoters50/4283522
tttatat

SEQ ID NO: 186931 - DNA, 11 bp, Unknown
  misc_feature (1)..( 11): Result.005 file - promoters50/4283550
tttttatatat

SEQ ID NO: 186932 - DNA, 11 bp, Unknown
  misc_feature (1)..( 11): Result.005 file - promoters50/4283550
aatttatttat

SEQ ID NO: 186933 - DNA, 11 bp, Unknown
  misc_feature (1)..( 11): Result.005 file - promoters50/4283550
aattgattcaa

SEQ ID NO: 186934 - DNA, 8 bp, Unknown
  misc_feature (1)..( 8): Result.005 file - promoters50/4283550
tatgtttt

SEQ ID NO: 186935 - DNA, 8 bp, Unknown
  misc_feature (1)..( 8): Result.005 file - promoters50/4283550
tatgtttt

SEQ ID NO: 186936 - DNA, 8 bp, Unknown
  misc_feature (1)..( 8): Result.005 file - promoters50/4283550
tatgcttt

SEQ ID NO: 186937 - DNA, 12 bp, Unknown
  misc_feature (1)..( 12): Result.005 file - promoters50/4283550
ttcggatatttt

SEQ ID NO: 186938 - DNA, 12 bp, Unknown
  misc_feature (1)..( 12): Result.005 file - promoters50/4283550
ttggaataattt

SEQ ID NO: 186939 - DNA, 12 bp, Unknown
  misc_feature (1)..( 12): Result.005 file - promoters50/4283550
ttctgatattat

SEQ ID NO: 186940 - DNA, 9 bp, Unknown
  misc_feature (1)..( 9): Result.005 file - promoters50/4283550
acaaatttg

SEQ ID NO: 186941 - DNA, 9 bp, Unknown
  misc_feature (1)..( 9): Result.005 file - promoters50/4283550
gataatttg

SEQ ID NO: 186942 - DNA, 9 bp, Unknown
  misc_feature (1)..( 9): Result.005 file - promoters50/4283550
gatgatttg

SEQ ID NO: 186943 - DNA, 9 bp, Unknown
  misc_feature (1)..( 9): Result.005 file - promoters50/4283554
cattttgta

SEQ ID NO: 186944 - DNA, 9 bp, Unknown
  misc_feature (1)..( 9): Result.005 file - promoters50/4283554
cattatgtc

SEQ ID NO: 186945 - DNA, 9 bp, Unknown
  misc_feature (1)..( 9): Result.005 file - promoters50/4283554
aatttagta

SEQ ID NO: 186946 - DNA, 7 bp, Unknown
  misc_feature (1)..( 7): Result.005 file - promoters50/4283554
ttgtttt

SEQ ID NO: 186947 - DNA, 7 bp, Unknown
  misc_feature (1)..( 7): Result.005 file - promoters50/4283554
ttgtttt

SEQ ID NO: 186948 - DNA, 7 bp, Unknown
  misc_feature (1)..( 7): Result.005 file - promoters50/4283554
gtgtttt

SEQ ID NO: 186949 - DNA, 8 bp, Unknown
  misc_feature (1)..( 8): Result.005 file - promoters50/4283554
attatttt

SEQ ID NO: 186950 - DNA, 8 bp, Unknown
  misc_feature (1)..( 8): Result.005 file - promoters50/4283554
attattaa

SEQ ID NO: 186951 - DNA, 8 bp, Unknown
  misc_feature (1)..( 8): Result.005 file - promoters50/4283554
tttactaa

SEQ ID NO: 186952 - DNA, 12 bp, Unknown
  misc_feature (1)..( 12): Result.005 file - promoters50/4283564
tcagaaccaaac

SEQ ID NO: 186953 - DNA, 12 bp, Unknown
  misc_feature (1)..( 12): Result.005 file - promoters50/4283564
tcataactctgt

SEQ ID NO: 186954 - DNA, 12 bp, Unknown
  misc_feature (1)..( 12): Result.005 file - promoters50/4283564
agagaacaaaac

SEQ ID NO: 186955 - DNA, 12 bp, Unknown
  misc_feature (1)..( 12): Result.005 file - promoters50/4283564
ccaaaaaaaaaa

SEQ ID NO: 186956 - DNA, 12 bp, Unknown
  misc_feature (1)..( 12): Result.005 file - promoters50/4283564
cgaaaacacaag

SEQ ID NO: 186957 - DNA, 7 bp, Unknown
  misc_feature (1)..( 7): Result.005 file - promoters50/4283573
aaaaatc

SEQ ID NO: 186958 - DNA, 7 bp, Unknown
  misc_feature (1)..( 7): Result.005 file - promoters50/4283573
aaacatc

SEQ ID NO: 186959 - DNA, 7 bp, Unknown
  misc_feature (1)..( 7): Result.005 file - promoters50/4283573
aaaaatt

SEQ ID NO: 186960 - DNA, 7 bp, Unknown
  misc_feature (1)..( 7): Result.005 file - promoters50/4283573
taagaat

SEQ ID NO: 186961 - DNA, 7 bp, Unknown
  misc_feature (1)..( 7): Result.005 file - promoters50/4283573
taaaaat

SEQ ID NO: 186962 - DNA, 7 bp, Unknown
  misc_feature (1)..( 7): Result.005 file - promoters50/4283573
taataat

SEQ ID NO: 186963 - DNA, 13 bp, Unknown
  misc_feature (1)..( 13): Result.005 file - promoters50/4283579
acaaatatatata

SEQ ID NO: 186964 - DNA, 13 bp, Unknown
  misc_feature (1)..( 13): Result.005 file - promoters50/4283579
tcaaatagagaga

SEQ ID NO: 186965 - DNA, 13 bp, Unknown
  misc_feature (1)..( 13): Result.005 file - promoters50/4283579
acaaaaaataaat

SEQ ID NO: 186966 - DNA, 13 bp, Unknown
  misc_feature (1)..( 13): Result.005 file - promoters50/4283579
aaaaacagaataa

SEQ ID NO: 186967 - DNA, 13 bp, Unknown
  misc_feature (1)..( 13): Result.005 file - promoters50/4283579
agaaacagaggat

SEQ ID NO: 186968 - DNA, 13 bp, Unknown
  misc_feature (1)..( 13): Result.005 file - promoters50/4283579
agaaaaatgtaaa

SEQ ID NO: 186969 - DNA, 9 bp, Unknown
  misc_feature (1)..( 9): Result.005 file - promoters50/4283591
taaatattt

SEQ ID NO: 186970 - DNA, 9 bp, Unknown
  misc_feature (1)..( 9): Result.005 file - promoters50/4283591
caaatatat

SEQ ID NO: 186971 - DNA, 9 bp, Unknown
  misc_feature (1)..( 9): Result.005 file - promoters50/4283591
caaatatat

SEQ ID NO: 186972 - DNA, 9 bp, Unknown
  misc_feature (1)..( 9): Result.005 file - promoters50/4283591
tttttatac

SEQ ID NO: 186973 - DNA, 9 bp, Unknown
  misc_feature (1)..( 9): Result.005 file - promoters50/4283591
tttttattt

SEQ ID NO: 186974 - DNA, 9 bp, Unknown
  misc_feature (1)..( 9): Result.005 file - promoters50/4283591
attttgttt

SEQ ID NO: 186975 - DNA, 9 bp, Unknown
  misc_feature (1)..( 9): Result.005 file - promoters50/4283591
gaaaatttt

SEQ ID NO: 186976 - DNA, 9 bp, Unknown
  misc_feature (1)..( 9): Result.005 file - promoters50/4283591
taaaacttt

SEQ ID NO: 186977 - DNA, 9 bp, Unknown
  misc_feature (1)..( 9): Result.005 file - promoters50/4283591
aaaaattta

SEQ ID NO: 186978 - DNA, 7 bp, Unknown
  misc_feature (1)..( 7): Result.005 file - promoters50/4283591
ttttaaa

SEQ ID NO: 186979 - DNA, 7 bp, Unknown
  misc_feature (1)..( 7): Result.005 file - promoters50/4283591
ttttaaa

SEQ ID NO: 186980 - DNA, 7 bp, Unknown
  misc_feature (1)..( 7): Result.005 file - promoters50/4283591
atttaaa

SEQ ID NO: 186981 - DNA, 9 bp, Unknown
  misc_feature (1)..( 9): Result.005 file - promoters50/4283591
cataaacta

SEQ ID NO: 186982 - DNA, 9 bp, Unknown
  misc_feature (1)..( 9): Result.005 file - promoters50/4283591
catacacta

SEQ ID NO: 186983 - DNA, 9 bp, Unknown
  misc_feature (1)..( 9): Result.005 file - promoters50/4283591
cataaaaat

SEQ ID NO: 186984 - DNA, 8 bp, Unknown
  misc_feature (1)..( 8): Result.005 file - promoters50/4283591
ttatttta

SEQ ID NO: 186985 - DNA, 8 bp, Unknown
  misc_feature (1)..( 8): Result.005 file - promoters50/4283591
ttaattta

SEQ ID NO: 186986 - DNA, 8 bp, Unknown
  misc_feature (1)..( 8): Result.005 file - promoters50/4283591
ttaatttc

SEQ ID NO: 186987 - DNA, 11 bp, Unknown
  misc_feature (1)..( 11): Result.005 file - promoters50/4283591
tgaatttatat

SEQ ID NO: 186988 - DNA, 11 bp, Unknown
  misc_feature (1)..( 11): Result.005 file - promoters50/4283591
caaatatatat

SEQ ID NO: 186989 - DNA, 11 bp, Unknown
  misc_feature (1)..( 11): Result.005 file - promoters50/4283591
caaatatatgt

SEQ ID NO: 186990 - DNA, 12 bp, Unknown
  misc_feature (1)..( 12): Result.005 file - promoters50/4283591
tttgaaatgtgt

SEQ ID NO: 186991 - DNA, 12 bp, Unknown
  misc_feature (1)..( 12): Result.005 file - promoters50/4283591
tttcaaatatat

SEQ ID NO: 186992 - DNA, 12 bp, Unknown
  misc_feature (1)..( 12): Result.005 file - promoters50/4283591
atccaaatatat

SEQ ID NO: 186993 - DNA, 10 bp, Unknown
  misc_feature (1)..( 10): Result.005 file - promoters50/4283591
aaactactct

SEQ ID NO: 186994 - DNA, 10 bp, Unknown
  misc_feature (1)..( 10): Result.005 file - promoters50/4283591
aaactatata

SEQ ID NO: 186995 - DNA, 10 bp, Unknown
  misc_feature (1)..( 10): Result.005 file - promoters50/4283591
aaaatatata

SEQ ID NO: 186996 - DNA, 10 bp, Unknown
  misc_feature (1)..( 10): Result.005 file - promoters50/4283591
ctactctatt

SEQ ID NO: 186997 - DNA, 10 bp, Unknown
  misc_feature (1)..( 10): Result.005 file - promoters50/4283591
aaactatata

SEQ ID NO: 186998 - DNA, 10 bp, Unknown
  misc_feature (1)..( 10): Result.005 file - promoters50/4283591
aaaatatata

SEQ ID NO: 186999 - DNA, 11 bp, Unknown
  misc_feature (1)..( 11): Result.005 file - promoters50/4283591
agatataaata

SEQ ID NO: 187000 - DNA, 11 bp, Unknown
  misc_feature (1)..( 11): Result.005 file - promoters50/4283591
ccatatatata

SEQ ID NO: 187001 - DNA, 11 bp, Unknown
  misc_feature (1)..( 11): Result.005 file - promoters50/4283591
ccatctataaa

SEQ ID NO: 187002 - DNA, 8 bp, Unknown
  misc_feature (1)..( 8): Result.005 file - promoters50/4283591
tacaaatt

SEQ ID NO: 187003 - DNA, 8 bp, Unknown
  misc_feature (1)..( 8): Result.005 file - promoters50/4283591
tacaaaac

SEQ ID NO: 187004 - DNA, 9 bp, Unknown
  misc_feature (1)..( 9): Result.005 file - promoters50/4283591
cacataacc

SEQ ID NO: 187005 - DNA, 7 bp, Unknown
  misc_feature (1)..( 7): Result.005 file - promoters50/4283591
gtttaat

SEQ ID NO: 187006 - DNA, 7 bp, Unknown
  misc_feature (1)..( 7): Result.005 file - promoters50/4283591
gtttaaa

SEQ ID NO: 187007 - DNA, 7 bp, Unknown
  misc_feature (1)..( 7): Result.005 file - promoters50/4283591
ttttaaa

SEQ ID NO: 187008 - DNA, 8 bp, Unknown
  misc_feature (1)..( 8): Result.005 file - promoters50/4283591
tctttttc

SEQ ID NO: 187009 - DNA, 8 bp, Unknown
  misc_feature (1)..( 8): Result.005 file - promoters50/4283591
tgtttttc

SEQ ID NO: 187010 - DNA, 8 bp, Unknown
  misc_feature (1)..( 8): Result.005 file - promoters50/4283591
tgttttta

SEQ ID NO: 187011 - DNA, 8 bp, Unknown
  misc_feature (1)..( 8): Result.005 file - promoters50/4283591
aaacatta

SEQ ID NO: 187012 - DNA, 8 bp, Unknown
  misc_feature (1)..( 8): Result.005 file - promoters50/4283591
aaaaatta

SEQ ID NO: 187013 - DNA, 8 bp, Unknown
  misc_feature (1)..( 8): Result.005 file - promoters50/4283591
aaaaatta

SEQ ID NO: 187014 - DNA, 8 bp, Unknown
  misc_feature (1)..( 8): Result.005 file - promoters50/4283607
ttcttgcc

SEQ ID NO: 187015 - DNA, 8 bp, Unknown
  misc_feature (1)..( 8): Result.005 file - promoters50/4283607
ttctggcc

SEQ ID NO: 187016 - DNA, 8 bp, Unknown
  misc_feature (1)..( 8): Result.005 file - promoters50/4283607
gtcttgcg

SEQ ID NO: 187017 - DNA, 9 bp, Unknown
  misc_feature (1)..( 9): Result.005 file - promoters50/4283614
gaccataaa

SEQ ID NO: 187018 - DNA, 9 bp, Unknown
  misc_feature (1)..( 9): Result.005 file - promoters50/4283614
aaccctaaa

SEQ ID NO: 187019 - DNA, 9 bp, Unknown
  misc_feature (1)..( 9): Result.005 file - promoters50/4283614
aaccctcac

SEQ ID NO: 187020 - DNA, 11 bp, Unknown
  misc_feature (1)..( 11): Result.005 file - promoters50/4283616
agactacagag

SEQ ID NO: 187021 - DNA, 11 bp, Unknown
  misc_feature (1)..( 11): Result.005 file - promoters50/4283616
ggactaaagat

SEQ ID NO: 187022 - DNA, 11 bp, Unknown
  misc_feature (1)..( 11): Result.005 file - promoters50/4283616
agaatacaatc

SEQ ID NO: 187023 - DNA, 11 bp, Unknown
  misc_feature (1)..( 11): Result.005 file - promoters50/4283616
acattaccgag

SEQ ID NO: 187024 - DNA, 11 bp, Unknown
  misc_feature (1)..( 11): Result.005 file - promoters50/4283616
caaatatgatt

SEQ ID NO: 187025 - DNA, 11 bp, Unknown
  misc_feature (1)..( 11): Result.005 file - promoters50/4283616
agacaaaacaa

SEQ ID NO: 187026 - DNA, 11 bp, Unknown
  misc_feature (1)..( 11): Result.005 file - promoters50/4283616
agaccaaagaa

SEQ ID NO: 187027 - DNA, 9 bp, Unknown
  misc_feature (1)..( 9): Result.005 file - promoters50/4283616
agtgaagag

SEQ ID NO: 187028 - DNA, 9 bp, Unknown
  misc_feature (1)..( 9): Result.005 file - promoters50/4283616
gatgaagaa

SEQ ID NO: 187029 - DNA, 9 bp, Unknown
  misc_feature (1)..( 9): Result.005 file - promoters50/4283616
gattaagtt

SEQ ID NO: 187030 - DNA, 9 bp, Unknown
  misc_feature (1)..( 9): Result.005 file - promoters50/4283616
ttggaagaa

SEQ ID NO: 187031 - DNA, 9 bp, Unknown
  misc_feature (1)..( 9): Result.005 file - promoters50/4283616
gattaaaat

SEQ ID NO: 187032 - DNA, 9 bp, Unknown
  misc_feature (1)..( 9): Result.005 file - promoters50/4283616
aattaaata

SEQ ID NO: 187033 - DNA, 9 bp, Unknown
  misc_feature (1)..( 9): Result.005 file - promoters50/4283616
gaggaagaa

SEQ ID NO: 187034 - DNA, 15 bp, Unknown
  misc_feature (1)..( 15): Result.005 file - promoters50/4283616
ctccgtttaagcttt

SEQ ID NO: 187035 - DNA, 15 bp, Unknown
  misc_feature (1)..( 15): Result.005 file - promoters50/4283616
tataccttaaacttt

SEQ ID NO: 187036 - DNA, 15 bp, Unknown
  misc_feature (1)..( 15): Result.005 file - promoters50/4283616
tttttagtaaacttt

SEQ ID NO: 187037 - DNA, 15 bp, Unknown
  misc_feature (1)..( 15): Result.005 file - promoters50/4283616
tccctcctaaaaacg

SEQ ID NO: 187038 - DNA, 15 bp, Unknown
  misc_feature (1)..( 15): Result.005 file - promoters50/4283616
aaacaagtaaaattt

SEQ ID NO: 187039 - DNA, 15 bp, Unknown
  misc_feature (1)..( 15): Result.005 file - promoters50/4283616
gaacgcataagctta

SEQ ID NO: 187040 - DNA, 15 bp, Unknown
  misc_feature (1)..( 15): Result.005 file - promoters50/4283616
aaacaagtaatcaaa

SEQ ID NO: 187041 - DNA, 10 bp, Unknown
  misc_feature (1)..( 10): Result.005 file - promoters50/4283620
atgttattca

SEQ ID NO: 187042 - DNA, 10 bp, Unknown
  misc_feature (1)..( 10): Result.005 file - promoters50/4283620
tggttattca

SEQ ID NO: 187043 - DNA, 10 bp, Unknown
  misc_feature (1)..( 10): Result.005 file - promoters50/4283620
tggtcattat

SEQ ID NO: 187044 - DNA, 9 bp, Unknown
  misc_feature (1)..( 9): Result.005 file - promoters50/4283620
gttaacatc

SEQ ID NO: 187045 - DNA, 9 bp, Unknown
  misc_feature (1)..( 9): Result.005 file - promoters50/4283620
ttcaacatc

SEQ ID NO: 187046 - DNA, 9 bp, Unknown
  misc_feature (1)..( 9): Result.005 file - promoters50/4283620
ttctacatg

SEQ ID NO: 187047 - DNA, 10 bp, Unknown
  misc_feature (1)..( 10): Result.005 file - promoters50/4283620
aaattatttt

SEQ ID NO: 187048 - DNA, 10 bp, Unknown
  misc_feature (1)..( 10): Result.005 file - promoters50/4283620
aaataattga

SEQ ID NO: 187049 - DNA, 10 bp, Unknown
  misc_feature (1)..( 10): Result.005 file - promoters50/4283620
tggtaattga

SEQ ID NO: 187050 - DNA, 9 bp, Unknown
  misc_feature (1)..( 9): Result.005 file - promoters50/4283620
aatattggt

SEQ ID NO: 187051 - DNA, 9 bp, Unknown
  misc_feature (1)..( 9): Result.005 file - promoters50/4283620
aattttggt

SEQ ID NO: 187052 - DNA, 9 bp, Unknown
  misc_feature (1)..( 9): Result.005 file - promoters50/4283620
aattttacg

SEQ ID NO: 187053 - DNA, 8 bp, Unknown
  misc_feature (1)..( 8): Result.005 file - promoters50/4283626
tataattt

SEQ ID NO: 187054 - DNA, 8 bp, Unknown
  misc_feature (1)..( 8): Result.005 file - promoters50/4283626
attaattt

SEQ ID NO: 187055 - DNA, 8 bp, Unknown
  misc_feature (1)..( 8): Result.005 file - promoters50/4283626
tattatta

SEQ ID NO: 187056 - DNA, 10 bp, Unknown
  misc_feature (1)..( 10): Result.005 file - promoters50/4283626
tttaatttcc

SEQ ID NO: 187057 - DNA, 10 bp, Unknown
  misc_feature (1)..( 10): Result.005 file - promoters50/4283626
tttaatttat

SEQ ID NO: 187058 - DNA, 10 bp, Unknown
  misc_feature (1)..( 10): Result.005 file - promoters50/4283626
ctcaatctcc

SEQ ID NO: 187059 - DNA, 8 bp, Unknown
  misc_feature (1)..( 8): Result.005 file - promoters50/4283632
tttattat

SEQ ID NO: 187060 - DNA, 8 bp, Unknown
  misc_feature (1)..( 8): Result.005 file - promoters50/4283632
attactat

SEQ ID NO: 187061 - DNA, 8 bp, Unknown
  misc_feature (1)..( 8): Result.005 file - promoters50/4283632
tttcttat

SEQ ID NO: 187062 - DNA, 8 bp, Unknown
  misc_feature (1)..( 8): Result.005 file - promoters50/4304982
aaataaat

SEQ ID NO: 187063 - DNA, 8 bp, Unknown
  misc_feature (1)..( 8): Result.005 file - promoters50/4304982
aaataaac

SEQ ID NO: 187064 - DNA, 9 bp, Unknown
  misc_feature (1)..( 9): Result.005 file - promoters50/4304982
ttgataaat

SEQ ID NO: 187065 - DNA, 9 bp, Unknown
  misc_feature (1)..( 9): Result.005 file - promoters50/4304982
aaagtaatt

SEQ ID NO: 187066 - DNA, 9 bp, Unknown
  misc_feature (1)..( 9): Result.005 file - promoters50/4304982
aaattaaat

SEQ ID NO: 187067 - DNA, 9 bp, Unknown
  misc_feature (1)..( 9): Result.005 file - promoters50/4304982
gaagcaata

SEQ ID NO: 187068 - DNA, 12 bp, Unknown
  misc_feature (1)..( 12): Result.005 file - promoters50/4304982
gaaataaatgac

SEQ ID NO: 187069 - DNA, 12 bp, Unknown
  misc_feature (1)..( 12): Result.005 file - promoters50/4304982
taaattaattaa

SEQ ID NO: 187070 - DNA, 12 bp, Unknown
  misc_feature (1)..( 12): Result.005 file - promoters50/4304982
cttatagatgta

SEQ ID NO: 187071 - DNA, 12 bp, Unknown
  misc_feature (1)..( 12): Result.005 file - promoters50/4304982
aaaataaactaa

SEQ ID NO: 187072 - DNA, 12 bp, Unknown
  misc_feature (1)..( 12): Result.005 file - promoters50/4304982
caaattaaatca

SEQ ID NO: 187073 - DNA, 12 bp, Unknown
  misc_feature (1)..( 12): Result.005 file - promoters50/4304982
cacattatcgat

SEQ ID NO: 187074 - DNA, 10 bp, Unknown
  misc_feature (1)..( 10): Result.005 file - promoters50/4304982
tatgttaaca

SEQ ID NO: 187075 - DNA, 10 bp, Unknown
  misc_feature (1)..( 10): Result.005 file - promoters50/4304982
aatgataaat

SEQ ID NO: 187076 - DNA, 10 bp, Unknown
  misc_feature (1)..( 10): Result.005 file - promoters50/4304982
aatgatggct

SEQ ID NO: 187077 - DNA, 10 bp, Unknown
  misc_feature (1)..( 10): Result.005 file - promoters50/4304982
aatgattaca

SEQ ID NO: 187078 - DNA, 10 bp, Unknown
  misc_feature (1)..( 10): Result.005 file - promoters50/4304982
tttgacaaat

SEQ ID NO: 187079 - DNA, 10 bp, Unknown
  misc_feature (1)..( 10): Result.005 file - promoters50/4304982
tattacaaat

SEQ ID NO: 187080 - DNA, 8 bp, Unknown
  misc_feature (1)..( 8): Result.005 file - promoters50/4305800
gtattact

SEQ ID NO: 187081 - DNA, 8 bp, Unknown
  misc_feature (1)..( 8): Result.005 file - promoters50/4305800
atattacg

SEQ ID NO: 187082 - DNA, 8 bp, Unknown
  misc_feature (1)..( 8): Result.005 file - promoters50/4305800
agattact

SEQ ID NO: 187083 - DNA, 8 bp, Unknown
  misc_feature (1)..( 8): Result.005 file - promoters50/4305800
gtagtaca

SEQ ID NO: 187084 - DNA, 9 bp, Unknown
  misc_feature (1)..( 9): Result.005 file - promoters50/4305800
agtatttgt

SEQ ID NO: 187085 - DNA, 9 bp, Unknown
  misc_feature (1)..( 9): Result.005 file - promoters50/4305800
agaatttgt

SEQ ID NO: 187086 - DNA, 9 bp, Unknown
  misc_feature (1)..( 9): Result.005 file - promoters50/4305800
agaaattgc

SEQ ID NO: 187087 - DNA, 8 bp, Unknown
  misc_feature (1)..( 8): Result.005 file - promoters50/4305800
tcctgctg

SEQ ID NO: 187088 - DNA, 8 bp, Unknown
  misc_feature (1)..( 8): Result.005 file - promoters50/4305800
tccagcta

SEQ ID NO: 187089 - DNA, 8 bp, Unknown
  misc_feature (1)..( 8): Result.005 file - promoters50/4305800
ttctgctg

SEQ ID NO: 187090 - DNA, 9 bp, Unknown
  misc_feature (1)..( 9): Result.005 file - promoters50/4305800
ttgacttgt

SEQ ID NO: 187091 - DNA, 9 bp, Unknown
  misc_feature (1)..( 9): Result.005 file - promoters50/4305800
tccacttgt

SEQ ID NO: 187092 - DNA, 9 bp, Unknown
  misc_feature (1)..( 9): Result.005 file - promoters50/4305800
tccacgtgt

SEQ ID NO: 187093 - DNA, 10 bp, Unknown
  misc_feature (1)..( 10): Result.005 file - promoters50/4307922
atatagaaat

SEQ ID NO: 187094 - DNA, 10 bp, Unknown
  misc_feature (1)..( 10): Result.005 file - promoters50/4307922
ataaagaggt

SEQ ID NO: 187095 - DNA, 10 bp, Unknown
  misc_feature (1)..( 10): Result.005 file - promoters50/4307922
ttattgaaat

SEQ ID NO: 187096 - DNA, 11 bp, Unknown
  misc_feature (1)..( 11): Result.005 file - promoters50/4378608
agatttacaag

SEQ ID NO: 187097 - DNA, 11 bp, Unknown
  misc_feature (1)..( 11): Result.005 file - promoters50/4378608
caattttcaat

SEQ ID NO: 187098 - DNA, 11 bp, Unknown
  misc_feature (1)..( 11): Result.005 file - promoters50/4378608
cattttacatc

SEQ ID NO: 187099 - DNA, 11 bp, Unknown
  misc_feature (1)..( 11): Result.005 file - promoters50/4378608
gaatttactga

SEQ ID NO: 187100 - DNA, 11 bp, Unknown
  misc_feature (1)..( 11): Result.005 file - promoters50/4378608
aaatttttttc

SEQ ID NO: 187101 - DNA, 11 bp, Unknown
  misc_feature (1)..( 11): Result.005 file - promoters50/4378608
aaggttatatc

SEQ ID NO: 187102 - DNA, 11 bp, Unknown
  misc_feature (1)..( 11): Result.005 file - promoters50/4378608
ggttttatgtt

SEQ ID NO: 187103 - DNA, 11 bp, Unknown
  misc_feature (1)..( 11): Result.005 file - promoters50/4577400
atgtaattaag

SEQ ID NO: 187104 - DNA, 11 bp, Unknown
  misc_feature (1)..( 11): Result.005 file - promoters50/4577400
ccagaattaag

SEQ ID NO: 187105 - DNA, 11 bp, Unknown
  misc_feature (1)..( 11): Result.005 file - promoters50/4577400
aaaacattaag

SEQ ID NO: 187106 - DNA, 11 bp, Unknown
  misc_feature (1)..( 11): Result.005 file - promoters50/4577400
ccataattagt

SEQ ID NO: 187107 - DNA, 11 bp, Unknown
  misc_feature (1)..( 11): Result.005 file - promoters50/4577400
atatatttata

SEQ ID NO: 187108 - DNA, 11 bp, Unknown
  misc_feature (1)..( 11): Result.005 file - promoters50/4577400
aaatacttaag

SEQ ID NO: 187109 - DNA, 11 bp, Unknown
  misc_feature (1)..( 11): Result.005 file - promoters50/4577400
aaataattaaa

SEQ ID NO: 187110 - DNA, 12 bp, Unknown
  misc_feature (1)..( 12): Result.005 file - promoters50/4577400
taaaattaaagg

SEQ ID NO: 187111 - DNA, 12 bp, Unknown
  misc_feature (1)..( 12): Result.005 file - promoters50/4577400
gtaaataaaaat

SEQ ID NO: 187112 - DNA, 12 bp, Unknown
  misc_feature (1)..( 12): Result.005 file - promoters50/4577400
gtacataattga

SEQ ID NO: 187113 - DNA, 12 bp, Unknown
  misc_feature (1)..( 12): Result.005 file - promoters50/4577400
atgtgtaaaaat

SEQ ID NO: 187114 - DNA, 12 bp, Unknown
  misc_feature (1)..( 12): Result.005 file - promoters50/4577400
gaaaataccctt

SEQ ID NO: 187115 - DNA, 12 bp, Unknown
  misc_feature (1)..( 12): Result.005 file - promoters50/4577400
actaataattat

SEQ ID NO: 187116 - DNA, 10 bp, Unknown
  misc_feature (1)..( 10): Result.005 file - promoters50/4607469
ctctttctct

SEQ ID NO: 187117 - DNA, 10 bp, Unknown
  misc_feature (1)..( 10): Result.005 file - promoters50/4607469
gtctctctct

SEQ ID NO: 187118 - DNA, 10 bp, Unknown
  misc_feature (1)..( 10): Result.005 file - promoters50/4607469
ttctctctcg

SEQ ID NO: 187119 - DNA, 8 bp, Unknown
  misc_feature (1)..( 8): Result.005 file - promoters50/4607469
aaattaaa

SEQ ID NO: 187120 - DNA, 8 bp, Unknown
  misc_feature (1)..( 8): Result.005 file - promoters50/4607469
aaatcaaa

SEQ ID NO: 187121 - DNA, 8 bp, Unknown
  misc_feature (1)..( 8): Result.005 file - promoters50/4607469
aaatcata

SEQ ID NO: 187122 - DNA, 8 bp, Unknown
  misc_feature (1)..( 8): Result.005 file - promoters50/4607469
caataaat

SEQ ID NO: 187123 - DNA, 8 bp, Unknown
  misc_feature (1)..( 8): Result.005 file - promoters50/4607469
aaatcaat

SEQ ID NO: 187124 - DNA, 8 bp, Unknown
  misc_feature (1)..( 8): Result.005 file - promoters50/4607469
aaatcata

SEQ ID NO: 187125 - DNA, 8 bp, Unknown
  misc_feature (1)..( 8): Result.005 file - promoters50/4607671
ttatataa

SEQ ID NO: 187126 - DNA, 8 bp, Unknown
  misc_feature (1)..( 8): Result.005 file - promoters50/4607671
ttatttaa

SEQ ID NO: 187127 - DNA, 8 bp, Unknown
  misc_feature (1)..( 8): Result.005 file - promoters50/4607671
gtatctaa

SEQ ID NO: 187128 - DNA, 9 bp, Unknown
  misc_feature (1)..( 9): Result.005 file - promoters50/4607671
aagtttaat

SEQ ID NO: 187129 - DNA, 9 bp, Unknown
  misc_feature (1)..( 9): Result.005 file - promoters50/4607671
aagtttttc

SEQ ID NO: 187130 - DNA, 9 bp, Unknown
  misc_feature (1)..( 9): Result.005 file - promoters50/4607671
cagtttttc

SEQ ID NO: 187131 - DNA, 13 bp, Unknown
  misc_feature (1)..( 13): Result.005 file - promoters50/4607671
attaacaaaatta

SEQ ID NO: 187132 - DNA, 13 bp, Unknown
  misc_feature (1)..( 13): Result.005 file - promoters50/4607671
taagataaagtta

SEQ ID NO: 187133 - DNA, 13 bp, Unknown
  misc_feature (1)..( 13): Result.005 file - promoters50/4607671
ttaactaaatggt

SEQ ID NO: 187134 - DNA, 8 bp, Unknown
  misc_feature (1)..( 8): Result.005 file - promoters50/4607671
taagtttt

SEQ ID NO: 187135 - DNA, 8 bp, Unknown
  misc_feature (1)..( 8): Result.005 file - promoters50/4607671
ttagtttt

SEQ ID NO: 187136 - DNA, 8 bp, Unknown
  misc_feature (1)..( 8): Result.005 file - promoters50/4607671
taactttc

SEQ ID NO: 187137 - DNA, 7 bp, Unknown
  misc_feature (1)..( 7): Result.005 file - promoters50/4607671
acaaaaa

SEQ ID NO: 187138 - DNA, 7 bp, Unknown
  misc_feature (1)..( 7): Result.005 file - promoters50/4607671
acaaaaa

SEQ ID NO: 187139 - DNA, 7 bp, Unknown
  misc_feature (1)..( 7): Result.005 file - promoters50/4607671
aaataaa

SEQ ID NO: 187140 - DNA, 12 bp, Unknown
  misc_feature (1)..( 12): Result.005 file - promoters50/4607678
cctatttaaatt

SEQ ID NO: 187141 - DNA, 12 bp, Unknown
  misc_feature (1)..( 12): Result.005 file - promoters50/4607678
tctctttatatt

SEQ ID NO: 187142 - DNA, 12 bp, Unknown
  misc_feature (1)..( 12): Result.005 file - promoters50/4607678
ttattttaaagc

SEQ ID NO: 187143 - DNA, 12 bp, Unknown
  misc_feature (1)..( 12): Result.005 file - promoters50/4607678
cctatataaaga

SEQ ID NO: 187144 - DNA, 12 bp, Unknown
  misc_feature (1)..( 12): Result.005 file - promoters50/4607678
ttttcttatatt

SEQ ID NO: 187145 - DNA, 12 bp, Unknown
  misc_feature (1)..( 12): Result.005 file - promoters50/4607678
ataatataaagt

SEQ ID NO: 187146 - DNA, 8 bp, Unknown
  misc_feature (1)..( 8): Result.005 file - promoters50/4607692
taatatta

SEQ ID NO: 187147 - DNA, 8 bp, Unknown
  misc_feature (1)..( 8): Result.005 file - promoters50/4607692
taaaattt

SEQ ID NO: 187148 - DNA, 8 bp, Unknown
  misc_feature (1)..( 8): Result.005 file - promoters50/4607692
taaaattt

SEQ ID NO: 187149 - DNA, 8 bp, Unknown
  misc_feature (1)..( 8): Result.005 file - promoters50/4607692
aaaaatta

SEQ ID NO: 187150 - DNA, 8 bp, Unknown
  misc_feature (1)..( 8): Result.005 file - promoters50/4607692
aaaaatat

SEQ ID NO: 187151 - DNA, 8 bp, Unknown
  misc_feature (1)..( 8): Result.005 file - promoters50/4607692
aaagatta

SEQ ID NO: 187152 - DNA, 10 bp, Unknown
  misc_feature (1)..( 10): Result.005 file - promoters50/4607692
atataatatt

SEQ ID NO: 187153 - DNA, 10 bp, Unknown
  misc_feature (1)..( 10): Result.005 file - promoters50/4607692
ataaaattaa

SEQ ID NO: 187154 - DNA, 10 bp, Unknown
  misc_feature (1)..( 10): Result.005 file - promoters50/4607692
agaaaattaa

SEQ ID NO: 187155 - DNA, 10 bp, Unknown
  misc_feature (1)..( 10): Result.005 file - promoters50/4607692
cgaacattac

SEQ ID NO: 187156 - DNA, 10 bp, Unknown
  misc_feature (1)..( 10): Result.005 file - promoters50/4607692
taataattaa

SEQ ID NO: 187157 - DNA, 10 bp, Unknown
  misc_feature (1)..( 10): Result.005 file - promoters50/4607692
attaaatatg

SEQ ID NO: 187158 - DNA, 10 bp, Unknown
  misc_feature (1)..( 10): Result.005 file - promoters50/4607692
attgaatatt

SEQ ID NO: 187159 - DNA, 12 bp, Unknown
  misc_feature (1)..( 12): Result.005 file - promoters50/4607692
gaaaaacgttga

SEQ ID NO: 187160 - DNA, 12 bp, Unknown
  misc_feature (1)..( 12): Result.005 file - promoters50/4607692
aaaaaactaatg

SEQ ID NO: 187161 - DNA, 12 bp, Unknown
  misc_feature (1)..( 12): Result.005 file - promoters50/4607692
aaaacacgtggc

SEQ ID NO: 187162 - DNA, 12 bp, Unknown
  misc_feature (1)..( 12): Result.005 file - promoters50/4607692
gaaacacgtcaa

SEQ ID NO: 187163 - DNA, 12 bp, Unknown
  misc_feature (1)..( 12): Result.005 file - promoters50/4607692
taaataaattaa

SEQ ID NO: 187164 - DNA, 12 bp, Unknown
  misc_feature (1)..( 12): Result.005 file - promoters50/4607692
aaaataaagaaa

SEQ ID NO: 187165 - DNA, 17 bp, Unknown
  misc_feature (1)..( 17): Result.005 file - promoters50/4607692
taacttgtaaagaaaag

SEQ ID NO: 187166 - DNA, 17 bp, Unknown
  misc_feature (1)..( 17): Result.005 file - promoters50/4607692
ttactcgtaatatttgt

SEQ ID NO: 187167 - DNA, 17 bp, Unknown
  misc_feature (1)..( 17): Result.005 file - promoters50/4607692
taatttgtatctatatt

SEQ ID NO: 187168 - DNA, 17 bp, Unknown
  misc_feature (1)..( 17): Result.005 file - promoters50/4607692
ctctttttatttcttta

SEQ ID NO: 187169 - DNA, 17 bp, Unknown
  misc_feature (1)..( 17): Result.005 file - promoters50/4607692
cgtcgtttacttcaaaa

SEQ ID NO: 187170 - DNA, 17 bp, Unknown
  misc_feature (1)..( 17): Result.005 file - promoters50/4607692
tacgtttcatttattta

SEQ ID NO: 187171 - DNA, 13 bp, Unknown
  misc_feature (1)..( 13): Result.005 file - promoters50/4607692
aaaaaacaaataa

SEQ ID NO: 187172 - DNA, 13 bp, Unknown
  misc_feature (1)..( 13): Result.005 file - promoters50/4607692
aaaaaagaaatga

SEQ ID NO: 187173 - DNA, 13 bp, Unknown
  misc_feature (1)..( 13): Result.005 file - promoters50/4607692
ttattacagataa

SEQ ID NO: 187174 - DNA, 13 bp, Unknown
  misc_feature (1)..( 13): Result.005 file - promoters50/4607692
agaaaagagtaat

SEQ ID NO: 187175 - DNA, 13 bp, Unknown
  misc_feature (1)..( 13): Result.005 file - promoters50/4607692
ctaaaagaagaat

SEQ ID NO: 187176 - DNA, 13 bp, Unknown
  misc_feature (1)..( 13): Result.005 file - promoters50/4607692
taaaaatgactag

SEQ ID NO: 187177 - DNA, 9 bp, Unknown
  misc_feature (1)..( 9): Result.005 file - promoters50/4607692
tttatatat

SEQ ID NO: 187178 - DNA, 9 bp, Unknown
  misc_feature (1)..( 9): Result.005 file - promoters50/4607692
attaaatat

SEQ ID NO: 187179 - DNA, 9 bp, Unknown
  misc_feature (1)..( 9): Result.005 file - promoters50/4607692
agaaaatat

SEQ ID NO: 187180 - DNA, 9 bp, Unknown
  misc_feature (1)..( 9): Result.005 file - promoters50/4607692
gccaaatat

SEQ ID NO: 187181 - DNA, 9 bp, Unknown
  misc_feature (1)..( 9): Result.005 file - promoters50/4607692
ggcaaatac

SEQ ID NO: 187182 - DNA, 9 bp, Unknown
  misc_feature (1)..( 9): Result.005 file - promoters50/4607692
ggcaaatgt

SEQ ID NO: 187183 - DNA, 14 bp, Unknown
  misc_feature (1)..( 14): Result.005 file - promoters50/4607692
aaactctttttatt

SEQ ID NO: 187184 - DNA, 14 bp, Unknown
  misc_feature (1)..( 14): Result.005 file - promoters50/4607692
cattattttttact

SEQ ID NO: 187185 - DNA, 14 bp, Unknown
  misc_feature (1)..( 14): Result.005 file - promoters50/4607692
atttaatttgtatc

SEQ ID NO: 187186 - DNA, 15 bp, Unknown
  misc_feature (1)..( 15): Result.005 file - promoters50/4607692
tttcatttatttaca

SEQ ID NO: 187187 - DNA, 15 bp, Unknown
  misc_feature (1)..( 15): Result.005 file - promoters50/4607692
tccgaattctttaaa

SEQ ID NO: 187188 - DNA, 15 bp, Unknown
  misc_feature (1)..( 15): Result.005 file - promoters50/4607692
gtcgtttacttcaaa

SEQ ID NO: 187189 - DNA, 14 bp, Unknown
  misc_feature (1)..( 14): Result.005 file - promoters50/4607692
atagagttttttct

SEQ ID NO: 187190 - DNA, 14 bp, Unknown
  misc_feature (1)..( 14): Result.005 file - promoters50/4607692
aaaaagttttattt

SEQ ID NO: 187191 - DNA, 14 bp, Unknown
  misc_feature (1)..( 14): Result.005 file - promoters50/4607692
ctatagtttcattt

SEQ ID NO: 187192 - DNA, 14 bp, Unknown
  misc_feature (1)..( 14): Result.005 file - promoters50/4607692
acctatattctttt

SEQ ID NO: 187193 - DNA, 14 bp, Unknown
  misc_feature (1)..( 14): Result.005 file - promoters50/4607692
aaaaactttttacg

SEQ ID NO: 187194 - DNA, 14 bp, Unknown
  misc_feature (1)..( 14): Result.005 file - promoters50/4607692
tttgccttttggaa

SEQ ID NO: 187195 - DNA, 12 bp, Unknown
  misc_feature (1)..( 12): Result.005 file - promoters50/4607719
ttaatattttta

SEQ ID NO: 187196 - DNA, 12 bp, Unknown
  misc_feature (1)..( 12): Result.005 file - promoters50/4607719
agtataattttg

SEQ ID NO: 187197 - DNA, 12 bp, Unknown
  misc_feature (1)..( 12): Result.005 file - promoters50/4607719
ttattatgtttg

SEQ ID NO: 187198 - DNA, 12 bp, Unknown
  misc_feature (1)..( 12): Result.005 file - promoters50/4607719
ggagtaagattg

SEQ ID NO: 187199 - DNA, 12 bp, Unknown
  misc_feature (1)..( 12): Result.005 file - promoters50/4607719
cattcgagattg

SEQ ID NO: 187200 - DNA, 12 bp, Unknown
  misc_feature (1)..( 12): Result.005 file - promoters50/4607719
atggtcagattg

SEQ ID NO: 187201 - DNA, 12 bp, Unknown
  misc_feature (1)..( 12): Result.005 file - promoters50/4607719
gagggcagcttg

SEQ ID NO: 187202 - DNA, 9 bp, Unknown
  misc_feature (1)..( 9): Result.005 file - promoters50/4607719
taatttact

SEQ ID NO: 187203 - DNA, 9 bp, Unknown
  misc_feature (1)..( 9): Result.005 file - promoters50/4607719
caatttact

SEQ ID NO: 187204 - DNA, 9 bp, Unknown
  misc_feature (1)..( 9): Result.005 file - promoters50/4607719
ttatttatt

SEQ ID NO: 187205 - DNA, 9 bp, Unknown
  misc_feature (1)..( 9): Result.005 file - promoters50/4607719
tgttttact

SEQ ID NO: 187206 - DNA, 9 bp, Unknown
  misc_feature (1)..( 9): Result.005 file - promoters50/4607719
aaatttaag

SEQ ID NO: 187207 - DNA, 9 bp, Unknown
  misc_feature (1)..( 9): Result.005 file - promoters50/4607719
atatttaat

SEQ ID NO: 187208 - DNA, 12 bp, Unknown
  misc_feature (1)..( 12): Result.005 file - promoters50/4607719
ttatacaatatt

SEQ ID NO: 187209 - DNA, 12 bp, Unknown
  misc_feature (1)..( 12): Result.005 file - promoters50/4607719
agttacaatatc

SEQ ID NO: 187210 - DNA, 12 bp, Unknown
  misc_feature (1)..( 12): Result.005 file - promoters50/4607719
gacaacaataga

SEQ ID NO: 187211 - DNA, 12 bp, Unknown
  misc_feature (1)..( 12): Result.005 file - promoters50/4607719
agcagcaaaatt

SEQ ID NO: 187212 - DNA, 12 bp, Unknown
  misc_feature (1)..( 12): Result.005 file - promoters50/4607719
cgtttcaagttt

SEQ ID NO: 187213 - DNA, 12 bp, Unknown
  misc_feature (1)..( 12): Result.005 file - promoters50/4607719
cgtgtcacgtat

SEQ ID NO: 187214 - DNA, 10 bp, Unknown
  misc_feature (1)..( 10): Result.005 file - promoters50/4607719
agtgattaaa

SEQ ID NO: 187215 - DNA, 10 bp, Unknown
  misc_feature (1)..( 10): Result.005 file - promoters50/4607719
attgataaaa

SEQ ID NO: 187216 - DNA, 10 bp, Unknown
  misc_feature (1)..( 10): Result.005 file - promoters50/4607719
attgagtaaa

SEQ ID NO: 187217 - DNA, 10 bp, Unknown
  misc_feature (1)..( 10): Result.005 file - promoters50/4607719
tttgttaaaa

SEQ ID NO: 187218 - DNA, 10 bp, Unknown
  misc_feature (1)..( 10): Result.005 file - promoters50/4607719
tttgttacag

SEQ ID NO: 187219 - DNA, 10 bp, Unknown
  misc_feature (1)..( 10): Result.005 file - promoters50/4607719
ttggagtaat

SEQ ID NO: 187220 - DNA, 11 bp, Unknown
  misc_feature (1)..( 11): Result.005 file - promoters50/4607719
ctaaaataata

SEQ ID NO: 187221 - DNA, 11 bp, Unknown
  misc_feature (1)..( 11): Result.005 file - promoters50/4607719
taaaaatacac

SEQ ID NO: 187222 - DNA, 11 bp, Unknown
  misc_feature (1)..( 11): Result.005 file - promoters50/4607719
tttaaataaaa

SEQ ID NO: 187223 - DNA, 11 bp, Unknown
  misc_feature (1)..( 11): Result.005 file - promoters50/4607719
gaaaaacatag

SEQ ID NO: 187224 - DNA, 11 bp, Unknown
  misc_feature (1)..( 11): Result.005 file - promoters50/4607719
gctaaataaaa

SEQ ID NO: 187225 - DNA, 11 bp, Unknown
  misc_feature (1)..( 11): Result.005 file - promoters50/4607719
taaagatagca

SEQ ID NO: 187226 - DNA, 9 bp, Unknown
  misc_feature (1)..( 9): Result.005 file - promoters50/4607719
attagtaat

SEQ ID NO: 187227 - DNA, 9 bp, Unknown
  misc_feature (1)..( 9): Result.005 file - promoters50/4607719
tttagtaaa

SEQ ID NO: 187228 - DNA, 9 bp, Unknown
  misc_feature (1)..( 9): Result.005 file - promoters50/4607719
atgagtaat

SEQ ID NO: 187229 - DNA, 9 bp, Unknown
  misc_feature (1)..( 9): Result.005 file - promoters50/4607719
gttaggaaa

SEQ ID NO: 187230 - DNA, 10 bp, Unknown
  misc_feature (1)..( 10): Result.005 file - promoters50/4607719
gccagtcaaa

SEQ ID NO: 187231 - DNA, 10 bp, Unknown
  misc_feature (1)..( 10): Result.005 file - promoters50/4607719
tttagtggtt

SEQ ID NO: 187232 - DNA, 11 bp, Unknown
  misc_feature (1)..( 11): Result.005 file - promoters50/4608096
tttataaactc

SEQ ID NO: 187233 - DNA, 11 bp, Unknown
  misc_feature (1)..( 11): Result.005 file - promoters50/4608096
actataaaact

SEQ ID NO: 187234 - DNA, 11 bp, Unknown
  misc_feature (1)..( 11): Result.005 file - promoters50/4608096
tatataaatcc

SEQ ID NO: 187235 - DNA, 11 bp, Unknown
  misc_feature (1)..( 11): Result.005 file - promoters50/4608096
actataaatct

SEQ ID NO: 187236 - DNA, 11 bp, Unknown
  misc_feature (1)..( 11): Result.005 file - promoters50/4608096
tttatgaatcc

SEQ ID NO: 187237 - DNA, 11 bp, Unknown
  misc_feature (1)..( 11): Result.005 file - promoters50/4608096
tttataaaacc

SEQ ID NO: 187238 - DNA, 11 bp, Unknown
  misc_feature (1)..( 11): Result.005 file - promoters50/4608096
tatataagtat

SEQ ID NO: 187239 - DNA, 12 bp, Unknown
  misc_feature (1)..( 12): Result.005 file - promoters50/4608140
cgtttatgattt

SEQ ID NO: 187240 - DNA, 12 bp, Unknown
  misc_feature (1)..( 12): Result.005 file - promoters50/4608140
tagatatgataa

SEQ ID NO: 187241 - DNA, 12 bp, Unknown
  misc_feature (1)..( 12): Result.005 file - promoters50/4608140
gttgtataattt

SEQ ID NO: 187242 - DNA, 12 bp, Unknown
  misc_feature (1)..( 12): Result.005 file - promoters50/4608140
tcgtgatgtttt

SEQ ID NO: 187243 - DNA, 12 bp, Unknown
  misc_feature (1)..( 12): Result.005 file - promoters50/4608140
aacatatgacta

SEQ ID NO: 187244 - DNA, 12 bp, Unknown
  misc_feature (1)..( 12): Result.005 file - promoters50/4608140
atcatatgaaaa

SEQ ID NO: 187245 - DNA, 12 bp, Unknown
  misc_feature (1)..( 12): Result.005 file - promoters50/4608140
aacatttgaacc

SEQ ID NO: 187246 - DNA, 15 bp, Unknown
  misc_feature (1)..( 15): Result.005 file - promoters50/4608140
aaaaaaaaagttaag

SEQ ID NO: 187247 - DNA, 15 bp, Unknown
  misc_feature (1)..( 15): Result.005 file - promoters50/4608140
atcttcaaaattata

SEQ ID NO: 187248 - DNA, 15 bp, Unknown
  misc_feature (1)..( 15): Result.005 file - promoters50/4608140
aaaaaaaaagttttt

SEQ ID NO: 187249 - DNA, 15 bp, Unknown
  misc_feature (1)..( 15): Result.005 file - promoters50/4608140
tgaacttaagttact

SEQ ID NO: 187250 - DNA, 15 bp, Unknown
  misc_feature (1)..( 15): Result.005 file - promoters50/4608140
cagaaaatagtttac

SEQ ID NO: 187251 - DNA, 15 bp, Unknown
  misc_feature (1)..( 15): Result.005 file - promoters50/4608140
aggtttgaagtttga

SEQ ID NO: 187252 - DNA, 15 bp, Unknown
  misc_feature (1)..( 15): Result.005 file - promoters50/4608140
acaacaataatttac

SEQ ID NO: 187253 - DNA, 15 bp, Unknown
  misc_feature (1)..( 15): Result.005 file - promoters50/4608140
accaagatatttttg

SEQ ID NO: 187254 - DNA, 12 bp, Unknown
  misc_feature (1)..( 12): Result.005 file - promoters50/4608140
gttgtttattat

SEQ ID NO: 187255 - DNA, 12 bp, Unknown
  misc_feature (1)..( 12): Result.005 file - promoters50/4608140
tttgattagtaa

SEQ ID NO: 187256 - DNA, 12 bp, Unknown
  misc_feature (1)..( 12): Result.005 file - promoters50/4608140
tttggttaaaac

SEQ ID NO: 187257 - DNA, 12 bp, Unknown
  misc_feature (1)..( 12): Result.005 file - promoters50/4608140
atagtttactat

SEQ ID NO: 187258 - DNA, 12 bp, Unknown
  misc_feature (1)..( 12): Result.005 file - promoters50/4608140
actcttttgaag

SEQ ID NO: 187259 - DNA, 12 bp, Unknown
  misc_feature (1)..( 12): Result.005 file - promoters50/4608140
ttaagttactac

SEQ ID NO: 187260 - DNA, 8 bp, Unknown
  misc_feature (1)..( 8): Result.005 file - promoters50/4608140
attttttt

SEQ ID NO: 187261 - DNA, 8 bp, Unknown
  misc_feature (1)..( 8): Result.005 file - promoters50/4608140
gttttttt

SEQ ID NO: 187262 - DNA, 8 bp, Unknown
  misc_feature (1)..( 8): Result.005 file - promoters50/4608140
atttttta

SEQ ID NO: 187263 - DNA, 9 bp, Unknown
  misc_feature (1)..( 9): Result.005 file - promoters50/4608140
ttttgtttt

SEQ ID NO: 187264 - DNA, 9 bp, Unknown
  misc_feature (1)..( 9): Result.005 file - promoters50/4608140
atttttatt

SEQ ID NO: 187265 - DNA, 9 bp, Unknown
  misc_feature (1)..( 9): Result.005 file - promoters50/4608140
cttgtttta

SEQ ID NO: 187266 - DNA, 20 bp, Unknown
  misc_feature (1)..( 20): Result.005 file - promoters50/4608140
ttggtaaaaaatatgaaaga

SEQ ID NO: 187267 - DNA, 20 bp, Unknown
  misc_feature (1)..( 20): Result.005 file - promoters50/4608140
tatttcaaaaatacttacaa

SEQ ID NO: 187268 - DNA, 21 bp, Unknown
  misc_feature (1)..( 21): Result.005 file - promoters50/4608140
tttgggaaaaagtatgcaaga

SEQ ID NO: 187269 - DNA, 21 bp, Unknown
  misc_feature (1)..( 21): Result.005 file - promoters50/4608140
agtaacaaaaaagatgtatat

SEQ ID NO: 187270 - DNA, 21 bp, Unknown
  misc_feature (1)..( 21): Result.005 file - promoters50/4608140
agaaataacaaagaacttaat

SEQ ID NO: 187271 - DNA, 21 bp, Unknown
  misc_feature (1)..( 21): Result.005 file - promoters50/4608140
ttttgctaaaaatccttgaga

SEQ ID NO: 187272 - DNA, 21 bp, Unknown
  misc_feature (1)..( 21): Result.005 file - promoters50/4608140
ttgttgaagaagtttcgaaag

SEQ ID NO: 187273 - DNA, 12 bp, Unknown
  misc_feature (1)..( 12): Result.005 file - promoters50/4608140
taagaaaaaaaa

SEQ ID NO: 187274 - DNA, 12 bp, Unknown
  misc_feature (1)..( 12): Result.005 file - promoters50/4608140
aaaggaaaacta

SEQ ID NO: 187275 - DNA, 12 bp, Unknown
  misc_feature (1)..( 12): Result.005 file - promoters50/4608140
taaaaaaaatcc

SEQ ID NO: 187276 - DNA, 12 bp, Unknown
  misc_feature (1)..( 12): Result.005 file - promoters50/4608140
gaataaaaacag

SEQ ID NO: 187277 - DNA, 12 bp, Unknown
  misc_feature (1)..( 12): Result.005 file - promoters50/4608140
ttacaaaaattt

SEQ ID NO: 187278 - DNA, 12 bp, Unknown
  misc_feature (1)..( 12): Result.005 file - promoters50/4608140
gatgaaatattt

SEQ ID NO: 187279 - DNA, 11 bp, Unknown
  misc_feature (1)..( 11): Result.005 file - promoters50/4608140
aaagaaattta

SEQ ID NO: 187280 - DNA, 11 bp, Unknown
  misc_feature (1)..( 11): Result.005 file - promoters50/4608140
caagaaaaact

SEQ ID NO: 187281 - DNA, 11 bp, Unknown
  misc_feature (1)..( 11): Result.005 file - promoters50/4608140
cgagaaaaaac

SEQ ID NO: 187282 - DNA, 12 bp, Unknown
  misc_feature (1)..( 12): Result.005 file - promoters50/4608140
atagacaaaaca

SEQ ID NO: 187283 - DNA, 12 bp, Unknown
  misc_feature (1)..( 12): Result.005 file - promoters50/4608140
tttatcaaaacc

SEQ ID NO: 187284 - DNA, 12 bp, Unknown
  misc_feature (1)..( 12): Result.005 file - promoters50/4608140
aaagaataatca

SEQ ID NO: 187285 - DNA, 12 bp, Unknown
  misc_feature (1)..( 12): Result.005 file - promoters50/4608140
gtagtcaaacga

SEQ ID NO: 187286 - DNA, 12 bp, Unknown
  misc_feature (1)..( 12): Result.005 file - promoters50/4608140
gtttattataat

SEQ ID NO: 187287 - DNA, 12 bp, Unknown
  misc_feature (1)..( 12): Result.005 file - promoters50/4608140
tgatattatttt

SEQ ID NO: 187288 - DNA, 12 bp, Unknown
  misc_feature (1)..( 12): Result.005 file - promoters50/4608140
gtttactattta

SEQ ID NO: 187289 - DNA, 12 bp, Unknown
  misc_feature (1)..( 12): Result.005 file - promoters50/4608140
aataactctttt

SEQ ID NO: 187290 - DNA, 12 bp, Unknown
  misc_feature (1)..( 12): Result.005 file - promoters50/4608140
agttactaccaa

SEQ ID NO: 187291 - DNA, 12 bp, Unknown
  misc_feature (1)..( 12): Result.005 file - promoters50/4608140
aaatattaattt

SEQ ID NO: 187292 - DNA, 9 bp, Unknown
  misc_feature (1)..( 9): Result.005 file - promoters50/4608140
aaactatcg

SEQ ID NO: 187293 - DNA, 9 bp, Unknown
  misc_feature (1)..( 9): Result.005 file - promoters50/4608140
aaaatatta

SEQ ID NO: 187294 - DNA, 9 bp, Unknown
  misc_feature (1)..( 9): Result.005 file - promoters50/4608140
aaagaatca

SEQ ID NO: 187295 - DNA, 9 bp, Unknown
  misc_feature (1)..( 9): Result.005 file - promoters50/4608140
aaagaaaca

SEQ ID NO: 187296 - DNA, 9 bp, Unknown
  misc_feature (1)..( 9): Result.005 file - promoters50/4608140
taataataa

SEQ ID NO: 187297 - DNA, 9 bp, Unknown
  misc_feature (1)..( 9): Result.005 file - promoters50/4608140
taataatgt

SEQ ID NO: 187298 - DNA, 11 bp, Unknown
  misc_feature (1)..( 11): Result.005 file - promoters50/4608140
gagaaaaaaca

SEQ ID NO: 187299 - DNA, 11 bp, Unknown
  misc_feature (1)..( 11): Result.005 file - promoters50/4608140
caagaaaaact

SEQ ID NO: 187300 - DNA, 11 bp, Unknown
  misc_feature (1)..( 11): Result.005 file - promoters50/4608140
tagacaaaaca

SEQ ID NO: 187301 - DNA, 11 bp, Unknown
  misc_feature (1)..( 11): Result.005 file - promoters50/4608140
ttatcaaaacc

SEQ ID NO: 187302 - DNA, 11 bp, Unknown
  misc_feature (1)..( 11): Result.005 file - promoters50/4608140
cttaaagaata

SEQ ID NO: 187303 - DNA, 11 bp, Unknown
  misc_feature (1)..( 11): Result.005 file - promoters50/4608140
tagtcaaacga

SEQ ID NO: 187304 - DNA, 17 bp, Unknown
  misc_feature (1)..( 17): Result.005 file - promoters50/4608140
atagacgaaacaaagaa

SEQ ID NO: 187305 - DNA, 17 bp, Unknown
  misc_feature (1)..( 17): Result.005 file - promoters50/4608140
tattacaaaacagagaa

SEQ ID NO: 187306 - DNA, 17 bp, Unknown
  misc_feature (1)..( 17): Result.005 file - promoters50/4608140
atagacaaaacaattaa

SEQ ID NO: 187307 - DNA, 17 bp, Unknown
  misc_feature (1)..( 17): Result.005 file - promoters50/4608140
gtatagttcttaaagaa

SEQ ID NO: 187308 - DNA, 17 bp, Unknown
  misc_feature (1)..( 17): Result.005 file - promoters50/4608140
tttatcaaaaccgttac

SEQ ID NO: 187309 - DNA, 17 bp, Unknown
  misc_feature (1)..( 17): Result.005 file - promoters50/4608140
gtagtcaaacgatttct

SEQ ID NO: 187310 - DNA, 7 bp, Unknown
  misc_feature (1)..( 7): Result.005 file - promoters50/4608143
ttagttt

SEQ ID NO: 187311 - DNA, 7 bp, Unknown
  misc_feature (1)..( 7): Result.005 file - promoters50/4608143
ttaattt

SEQ ID NO: 187312 - DNA, 7 bp, Unknown
  misc_feature (1)..( 7): Result.005 file - promoters50/4608143
ttacttt

SEQ ID NO: 187313 - DNA, 11 bp, Unknown
  misc_feature (1)..( 11): Result.005 file - promoters50/4608143
aagtttaaaat

SEQ ID NO: 187314 - DNA, 11 bp, Unknown
  misc_feature (1)..( 11): Result.005 file - promoters50/4608143
aagtataactt

SEQ ID NO: 187315 - DNA, 11 bp, Unknown
  misc_feature (1)..( 11): Result.005 file - promoters50/4608143
gcatatacctt

SEQ ID NO: 187316 - DNA, 8 bp, Unknown
  misc_feature (1)..( 8): Result.005 file - promoters50/4608143
attttata

SEQ ID NO: 187317 - DNA, 8 bp, Unknown
  misc_feature (1)..( 8): Result.005 file - promoters50/4608143
attatata

SEQ ID NO: 187318 - DNA, 8 bp, Unknown
  misc_feature (1)..( 8): Result.005 file - promoters50/4608143
attttacg

SEQ ID NO: 187319 - DNA, 8 bp, Unknown
  misc_feature (1)..( 8): Result.005 file - promoters50/4608143
gttaaata

SEQ ID NO: 187320 - DNA, 8 bp, Unknown
  misc_feature (1)..( 8): Result.005 file - promoters50/4608143
aaaaatgt

SEQ ID NO: 187321 - DNA, 8 bp, Unknown
  misc_feature (1)..( 8): Result.005 file - promoters50/4608143
aaatatga

SEQ ID NO: 187322 - DNA, 8 bp, Unknown
  misc_feature (1)..( 8): Result.005 file - promoters50/4608143
aaatattt

SEQ ID NO: 187323 - DNA, 8 bp, Unknown
  misc_feature (1)..( 8): Result.005 file - promoters50/4608143
gaatgttt

SEQ ID NO: 187324 - DNA, 8 bp, Unknown
  misc_feature (1)..( 8): Result.005 file - promoters50/4608143
catatatg

SEQ ID NO: 187325 - DNA, 8 bp, Unknown
  misc_feature (1)..( 8): Result.005 file - promoters50/4608143
aatatata

SEQ ID NO: 187326 - DNA, 8 bp, Unknown
  misc_feature (1)..( 8): Result.005 file - promoters50/4608143
aatttata

SEQ ID NO: 187327 - DNA, 15 bp, Unknown
  misc_feature (1)..( 15): Result.005 file - promoters50/4608143
aaggatgctgtgcca

SEQ ID NO: 187328 - DNA, 15 bp, Unknown
  misc_feature (1)..( 15): Result.005 file - promoters50/4608143
aaggatgatggacca

SEQ ID NO: 187329 - DNA, 15 bp, Unknown
  misc_feature (1)..( 15): Result.005 file - promoters50/4608143
aaggatgatggacca

SEQ ID NO: 187330 - DNA, 21 bp, Unknown
  misc_feature (1)..( 21): Result.005 file - promoters50/4608143
cccacgtaaataacgtggtcc

SEQ ID NO: 187331 - DNA, 21 bp, Unknown
  misc_feature (1)..( 21): Result.005 file - promoters50/4608143
tacacattaataacgtggtcc

SEQ ID NO: 187332 - DNA, 21 bp, Unknown
  misc_feature (1)..( 21): Result.005 file - promoters50/4608143
tacacattaataacgtggtcg

SEQ ID NO: 187333 - DNA, 21 bp, Unknown
  misc_feature (1)..( 21): Result.005 file - promoters50/4608143
atgaggtttgttcagtgatcc

SEQ ID NO: 187334 - DNA, 10 bp, Unknown
  misc_feature (1)..( 10): Result.005 file - promoters50/4608143
taaattaata

SEQ ID NO: 187335 - DNA, 10 bp, Unknown
  misc_feature (1)..( 10): Result.005 file - promoters50/4608143
taaatcaata

SEQ ID NO: 187336 - DNA, 10 bp, Unknown
  misc_feature (1)..( 10): Result.005 file - promoters50/4608143
gtaattaact

SEQ ID NO: 187337 - DNA, 11 bp, Unknown
  misc_feature (1)..( 11): Result.005 file - promoters50/4608143
aattaataaaa

SEQ ID NO: 187338 - DNA, 11 bp, Unknown
  misc_feature (1)..( 11): Result.005 file - promoters50/4608143
cttgaataaat

SEQ ID NO: 187339 - DNA, 11 bp, Unknown
  misc_feature (1)..( 11): Result.005 file - promoters50/4608143
cttaaatcaat

SEQ ID NO: 187340 - DNA, 9 bp, Unknown
  misc_feature (1)..( 9): Result.005 file - promoters50/4608345
aaaaaataa

SEQ ID NO: 187341 - DNA, 9 bp, Unknown
  misc_feature (1)..( 9): Result.005 file - promoters50/4608345
aaaacataa

SEQ ID NO: 187342 - DNA, 9 bp, Unknown
  misc_feature (1)..( 9): Result.005 file - promoters50/4608345
taaacattc

SEQ ID NO: 187343 - DNA, 12 bp, Unknown
  misc_feature (1)..( 12): Result.005 file - promoters50/4608965
gggcaaatcatc

SEQ ID NO: 187344 - DNA, 12 bp, Unknown
  misc_feature (1)..( 12): Result.005 file - promoters50/4608965
aaacaaatcaaa

SEQ ID NO: 187345 - DNA, 12 bp, Unknown
  misc_feature (1)..( 12): Result.005 file - promoters50/4608965
ttataaatcatc

SEQ ID NO: 187346 - DNA, 12 bp, Unknown
  misc_feature (1)..( 12): Result.005 file - promoters50/4608965
ggcaaaaccaaa

SEQ ID NO: 187347 - DNA, 12 bp, Unknown
  misc_feature (1)..( 12): Result.005 file - promoters50/4608965
aatttaatcaat

SEQ ID NO: 187348 - DNA, 12 bp, Unknown
  misc_feature (1)..( 12): Result.005 file - promoters50/4608965
gattaaatgaat

SEQ ID NO: 187349 - DNA, 12 bp, Unknown
  misc_feature (1)..( 12): Result.005 file - promoters50/4608965
gattaatgtctc

SEQ ID NO: 187350 - DNA, 13 bp, Unknown
  misc_feature (1)..( 13): Result.005 file - promoters50/4608965
cattcgtttagtc

SEQ ID NO: 187351 - DNA, 13 bp, Unknown
  misc_feature (1)..( 13): Result.005 file - promoters50/4608965
cattagtttcctg

SEQ ID NO: 187352 - DNA, 11 bp, Unknown
  misc_feature (1)..( 11): Result.005 file - promoters50/4608965
ttaatttcctg

SEQ ID NO: 187353 - DNA, 13 bp, Unknown
  misc_feature (1)..( 13): Result.005 file - promoters50/4608965
cccaagtgtccta

SEQ ID NO: 187354 - DNA, 13 bp, Unknown
  misc_feature (1)..( 13): Result.005 file - promoters50/4608965
atttactttggaa

SEQ ID NO: 187355 - DNA, 13 bp, Unknown
  misc_feature (1)..( 13): Result.005 file - promoters50/4608965
ttaatgtttgctt

SEQ ID NO: 187356 - DNA, 9 bp, Unknown
  misc_feature (1)..( 9): Result.005 file - promoters50/4608965
gaacgaaat

SEQ ID NO: 187357 - DNA, 9 bp, Unknown
  misc_feature (1)..( 9): Result.005 file - promoters50/4608965
ttacgaaat

SEQ ID NO: 187358 - DNA, 9 bp, Unknown
  misc_feature (1)..( 9): Result.005 file - promoters50/4608965
caaccaaaa

SEQ ID NO: 187359 - DNA, 9 bp, Unknown
  misc_feature (1)..( 9): Result.005 file - promoters50/4608965
taacaaaac

SEQ ID NO: 187360 - DNA, 9 bp, Unknown
  misc_feature (1)..( 9): Result.005 file - promoters50/4608965
caacgaaac

SEQ ID NO: 187361 - DNA, 9 bp, Unknown
  misc_feature (1)..( 9): Result.005 file - promoters50/4608965
ttatcaaat

SEQ ID NO: 187362 - DNA, 8 bp, Unknown
  misc_feature (1)..( 8): Result.005 file - promoters50/4608983
gaattaaa

SEQ ID NO: 187363 - DNA, 8 bp, Unknown
  misc_feature (1)..( 8): Result.005 file - promoters50/4608983
gaagtaag

SEQ ID NO: 187364 - DNA, 8 bp, Unknown
  misc_feature (1)..( 8): Result.005 file - promoters50/4608983
caaggaag

SEQ ID NO: 187365 - DNA, 13 bp, Unknown
  misc_feature (1)..( 13): Result.005 file - promoters50/4608985
aatactaaaaatc

SEQ ID NO: 187366 - DNA, 13 bp, Unknown
  misc_feature (1)..( 13): Result.005 file - promoters50/4608985
tagtttaaaaatt

SEQ ID NO: 187367 - DNA, 13 bp, Unknown
  misc_feature (1)..( 13): Result.005 file - promoters50/4608985
aataccaaaattc

SEQ ID NO: 187368 - DNA, 13 bp, Unknown
  misc_feature (1)..( 13): Result.005 file - promoters50/4608985
acttggtaaaatt

SEQ ID NO: 187369 - DNA, 13 bp, Unknown
  misc_feature (1)..( 13): Result.005 file - promoters50/4608985
agtttcaaatatt

SEQ ID NO: 187370 - DNA, 13 bp, Unknown
  misc_feature (1)..( 13): Result.005 file - promoters50/4608985
catttccaaaatt

SEQ ID NO: 187371 - DNA, 13 bp, Unknown
  misc_feature (1)..( 13): Result.005 file - promoters50/4608985
caaaaataagatt

SEQ ID NO: 187372 - DNA, 11 bp, Unknown
  misc_feature (1)..( 11): Result.005 file - promoters50/4608985
agttaatatat

SEQ ID NO: 187373 - DNA, 11 bp, Unknown
  misc_feature (1)..( 11): Result.005 file - promoters50/4608985
agttaaaaaat

SEQ ID NO: 187374 - DNA, 11 bp, Unknown
  misc_feature (1)..( 11): Result.005 file - promoters50/4608985
tgttattatat

SEQ ID NO: 187375 - DNA, 11 bp, Unknown
  misc_feature (1)..( 11): Result.005 file - promoters50/4608985
cgttaaagtta

SEQ ID NO: 187376 - DNA, 11 bp, Unknown
  misc_feature (1)..( 11): Result.005 file - promoters50/4608985
agttatttaaa

SEQ ID NO: 187377 - DNA, 11 bp, Unknown
  misc_feature (1)..( 11): Result.005 file - promoters50/4608985
aattatttaca

SEQ ID NO: 187378 - DNA, 14 bp, Unknown
  misc_feature (1)..( 14): Result.005 file - promoters50/4608985
tattttatttttgt

SEQ ID NO: 187379 - DNA, 14 bp, Unknown
  misc_feature (1)..( 14): Result.005 file - promoters50/4608985
agattgatttttgt

SEQ ID NO: 187380 - DNA, 14 bp, Unknown
  misc_feature (1)..( 14): Result.005 file - promoters50/4608985
tattatatatttca

SEQ ID NO: 187381 - DNA, 14 bp, Unknown
  misc_feature (1)..( 14): Result.005 file - promoters50/4608985
ttggatatatcaaa

SEQ ID NO: 187382 - DNA, 14 bp, Unknown
  misc_feature (1)..( 14): Result.005 file - promoters50/4608985
gcttctatttctat

SEQ ID NO: 187383 - DNA, 14 bp, Unknown
  misc_feature (1)..( 14): Result.005 file - promoters50/4608985
aaattcattataaa

SEQ ID NO: 187384 - DNA, 9 bp, Unknown
  misc_feature (1)..( 9): Result.005 file - promoters50/4608985
ttttatttt

SEQ ID NO: 187385 - DNA, 9 bp, Unknown
  misc_feature (1)..( 9): Result.005 file - promoters50/4608985
ctttattat

SEQ ID NO: 187386 - DNA, 10 bp, Unknown
  misc_feature (1)..( 10): Result.005 file - promoters50/4608985
cttctatttc

SEQ ID NO: 187387 - DNA, 11 bp, Unknown
  misc_feature (1)..( 11): Result.005 file - promoters50/4608985
atttatattat

SEQ ID NO: 187388 - DNA, 11 bp, Unknown
  misc_feature (1)..( 11): Result.005 file - promoters50/4608985
attaatattta

SEQ ID NO: 187389 - DNA, 11 bp, Unknown
  misc_feature (1)..( 11): Result.005 file - promoters50/4608985
attaataaagc

SEQ ID NO: 187390 - DNA, 11 bp, Unknown
  misc_feature (1)..( 11): Result.005 file - promoters50/4608985
ttcattataaa

SEQ ID NO: 187391 - DNA, 11 bp, Unknown
  misc_feature (1)..( 11): Result.005 file - promoters50/4608985
aatataactct

SEQ ID NO: 187392 - DNA, 11 bp, Unknown
  misc_feature (1)..( 11): Result.005 file - promoters50/4608985
aatttaactaa

SEQ ID NO: 187393 - DNA, 12 bp, Unknown
  misc_feature (1)..( 12): Result.005 file - promoters50/4608985
aatgatattcgt

SEQ ID NO: 187394 - DNA, 12 bp, Unknown
  misc_feature (1)..( 12): Result.005 file - promoters50/4608985
taaaatatacaa

SEQ ID NO: 187395 - DNA, 12 bp, Unknown
  misc_feature (1)..( 12): Result.005 file - promoters50/4608985
ttctataaataa

SEQ ID NO: 187396 - DNA, 12 bp, Unknown
  misc_feature (1)..( 12): Result.005 file - promoters50/4608985
acacatacacat

SEQ ID NO: 187397 - DNA, 11 bp, Unknown
  misc_feature (1)..( 11): Result.005 file - promoters50/4608985
aagagacaaaa

SEQ ID NO: 187398 - DNA, 11 bp, Unknown
  misc_feature (1)..( 11): Result.005 file - promoters50/4608985
gggttacaaaa

SEQ ID NO: 187399 - DNA, 11 bp, Unknown
  misc_feature (1)..( 11): Result.005 file - promoters50/4608985
caaagacaagt

SEQ ID NO: 187400 - DNA, 11 bp, Unknown
  misc_feature (1)..( 11): Result.005 file - promoters50/4608985
gtaagaaaaaa

SEQ ID NO: 187401 - DNA, 11 bp, Unknown
  misc_feature (1)..( 11): Result.005 file - promoters50/4608985
accccacaaaa

SEQ ID NO: 187402 - DNA, 11 bp, Unknown
  misc_feature (1)..( 11): Result.005 file - promoters50/4608985
gatagataaga

SEQ ID NO: 187403 - DNA, 11 bp, Unknown
  misc_feature (1)..( 11): Result.005 file - promoters50/4608985
tattgacaaaa

SEQ ID NO: 187404 - DNA, 14 bp, Unknown
  misc_feature (1)..( 14): Result.005 file - promoters50/4608985
ttaaaagaaagaga

SEQ ID NO: 187405 - DNA, 14 bp, Unknown
  misc_feature (1)..( 14): Result.005 file - promoters50/4608985
ttttaagaacgagg

SEQ ID NO: 187406 - DNA, 14 bp, Unknown
  misc_feature (1)..( 14): Result.005 file - promoters50/4608985
ttaaaataaaagtc

SEQ ID NO: 187407 - DNA, 14 bp, Unknown
  misc_feature (1)..( 14): Result.005 file - promoters50/4608985
tcactccaaagaga

SEQ ID NO: 187408 - DNA, 14 bp, Unknown
  misc_feature (1)..( 14): Result.005 file - promoters50/4608985
aaataataaatgat

SEQ ID NO: 187409 - DNA, 14 bp, Unknown
  misc_feature (1)..( 14): Result.005 file - promoters50/4608985
ataatataatgcaa

SEQ ID NO: 187410 - DNA, 12 bp, Unknown
  misc_feature (1)..( 12): Result.005 file - promoters50/4608985
tgtatatatact

SEQ ID NO: 187411 - DNA, 12 bp, Unknown
  misc_feature (1)..( 12): Result.005 file - promoters50/4608985
cctttataaact

SEQ ID NO: 187412 - DNA, 12 bp, Unknown
  misc_feature (1)..( 12): Result.005 file - promoters50/4608985
cgcctatatata

SEQ ID NO: 187413 - DNA, 12 bp, Unknown
  misc_feature (1)..( 12): Result.005 file - promoters50/4608985
cttttatatata

SEQ ID NO: 187414 - DNA, 12 bp, Unknown
  misc_feature (1)..( 12): Result.005 file - promoters50/4608985
tgtatatatact

SEQ ID NO: 187415 - DNA, 12 bp, Unknown
  misc_feature (1)..( 12): Result.005 file - promoters50/4608985
tccctataaatt

SEQ ID NO: 187416 - DNA, 12 bp, Unknown
  misc_feature (1)..( 12): Result.005 file - promoters50/4608985
acattatataaa

SEQ ID NO: 187417 - DNA, 10 bp, Unknown
  misc_feature (1)..( 10): Result.005 file - promoters50/4608985
ttttctgttc

SEQ ID NO: 187418 - DNA, 10 bp, Unknown
  misc_feature (1)..( 10): Result.005 file - promoters50/4608985
ttttcttttc

SEQ ID NO: 187419 - DNA, 10 bp, Unknown
  misc_feature (1)..( 10): Result.005 file - promoters50/4608985
ttttctataa

SEQ ID NO: 187420 - DNA, 10 bp, Unknown
  misc_feature (1)..( 10): Result.005 file - promoters50/4608985
atttcatttc

SEQ ID NO: 187421 - DNA, 10 bp, Unknown
  misc_feature (1)..( 10): Result.005 file - promoters50/4608985
atttatttcg

SEQ ID NO: 187422 - DNA, 10 bp, Unknown
  misc_feature (1)..( 10): Result.005 file - promoters50/4608985
ctttattaaa

SEQ ID NO: 187423 - DNA, 8 bp, Unknown
  misc_feature (1)..( 8): Result.005 file - promoters50/4608985
gttaaaaa

SEQ ID NO: 187424 - DNA, 8 bp, Unknown
  misc_feature (1)..( 8): Result.005 file - promoters50/4608985
tttaaaat

SEQ ID NO: 187425 - DNA, 9 bp, Unknown
  misc_feature (1)..( 9): Result.005 file - promoters50/4608985
tttacaaac

SEQ ID NO: 187426 - DNA, 9 bp, Unknown
  misc_feature (1)..( 9): Result.005 file - promoters50/4608985
gttaaagtt

SEQ ID NO: 187427 - DNA, 9 bp, Unknown
  misc_feature (1)..( 9): Result.005 file - promoters50/4608985
aagacaaac

SEQ ID NO: 187428 - DNA, 9 bp, Unknown
  misc_feature (1)..( 9): Result.005 file - promoters50/4608985
tttccaaaa

SEQ ID NO: 187429 - DNA, 10 bp, Unknown
  misc_feature (1)..( 10): Result.005 file - promoters50/4608985
taaactatga

SEQ ID NO: 187430 - DNA, 10 bp, Unknown
  misc_feature (1)..( 10): Result.005 file - promoters50/4608985
caaaatatca

SEQ ID NO: 187431 - DNA, 10 bp, Unknown
  misc_feature (1)..( 10): Result.005 file - promoters50/4608985
taaagtatac

SEQ ID NO: 187432 - DNA, 10 bp, Unknown
  misc_feature (1)..( 10): Result.005 file - promoters50/4608985
tcaaatatct

SEQ ID NO: 187433 - DNA, 10 bp, Unknown
  misc_feature (1)..( 10): Result.005 file - promoters50/4608985
aaaaccaaag

SEQ ID NO: 187434 - DNA, 10 bp, Unknown
  misc_feature (1)..( 10): Result.005 file - promoters50/4608985
acaaaaatca

SEQ ID NO: 187435 - DNA, 12 bp, Unknown
  misc_feature (1)..( 12): Result.005 file - promoters50/4608985
aaaaaaactaat

SEQ ID NO: 187436 - DNA, 12 bp, Unknown
  misc_feature (1)..( 12): Result.005 file - promoters50/4608985
taaataactaat

SEQ ID NO: 187437 - DNA, 12 bp, Unknown
  misc_feature (1)..( 12): Result.005 file - promoters50/4608985
aagaaaactcat

SEQ ID NO: 187438 - DNA, 12 bp, Unknown
  misc_feature (1)..( 12): Result.005 file - promoters50/4608985
taagaaatttcc

SEQ ID NO: 187439 - DNA, 12 bp, Unknown
  misc_feature (1)..( 12): Result.005 file - promoters50/4608985
tcttaaaataat

SEQ ID NO: 187440 - DNA, 13 bp, Unknown
  misc_feature (1)..( 13): Result.005 file - promoters50/4608985
cggctaacatatt

SEQ ID NO: 187441 - DNA, 12 bp, Unknown
  misc_feature (1)..( 12): Result.005 file - promoters50/4610292
tttttttactat

SEQ ID NO: 187442 - DNA, 12 bp, Unknown
  misc_feature (1)..( 12): Result.005 file - promoters50/4610292
tattttcactaa

SEQ ID NO: 187443 - DNA, 12 bp, Unknown
  misc_feature (1)..( 12): Result.005 file - promoters50/4610292
cagtttcaataa

SEQ ID NO: 187444 - DNA, 12 bp, Unknown
  misc_feature (1)..( 12): Result.005 file - promoters50/4610292
caggttcaaatc

SEQ ID NO: 187445 - DNA, 14 bp, Unknown
  misc_feature (1)..( 14): Result.005 file - promoters50/4610551
tctgttttttggtt

SEQ ID NO: 187446 - DNA, 14 bp, Unknown
  misc_feature (1)..( 14): Result.005 file - promoters50/4610551
ttactttttttttt

SEQ ID NO: 187447 - DNA, 14 bp, Unknown
  misc_feature (1)..( 14): Result.005 file - promoters50/4610551
tctctttttttgtt

SEQ ID NO: 187448 - DNA, 15 bp, Unknown
  misc_feature (1)..( 15): Result.005 file - promoters50/4610551
gttgttttgtttgtg

SEQ ID NO: 187449 - DNA, 15 bp, Unknown
  misc_feature (1)..( 15): Result.005 file - promoters50/4610551
aatggttggttgcag

SEQ ID NO: 187450 - DNA, 15 bp, Unknown
  misc_feature (1)..( 15): Result.005 file - promoters50/4610551
tgacgatttttggac

SEQ ID NO: 187451 - DNA, 16 bp, Unknown
  misc_feature (1)..( 16): Result.005 file - promoters50/4610551
tctgttttttggttag

SEQ ID NO: 187452 - DNA, 16 bp, Unknown
  misc_feature (1)..( 16): Result.005 file - promoters50/4610551
tgcaatggttggttgc

SEQ ID NO: 187453 - DNA, 16 bp, Unknown
  misc_feature (1)..( 16): Result.005 file - promoters50/4610551
tctctttttttgtttc

SEQ ID NO: 187454 - DNA, 16 bp, Unknown
  misc_feature (1)..( 16): Result.005 file - promoters50/4610551
gacgttgttttgtttg

SEQ ID NO: 187455 - DNA, 16 bp, Unknown
  misc_feature (1)..( 16): Result.005 file - promoters50/4610551
tgacgatttttggacc

SEQ ID NO: 187456 - DNA, 16 bp, Unknown
  misc_feature (1)..( 16): Result.005 file - promoters50/4610551
ttttttttttttttac

SEQ ID NO: 187457 - DNA, 9 bp, Unknown
  misc_feature (1)..( 9): Result.005 file - promoters50/4610628
ttctgtttg

SEQ ID NO: 187458 - DNA, 9 bp, Unknown
  misc_feature (1)..( 9): Result.005 file - promoters50/4610628
atctgtttg

SEQ ID NO: 187459 - DNA, 9 bp, Unknown
  misc_feature (1)..( 9): Result.005 file - promoters50/4610628
ttctgttgt

SEQ ID NO: 187460 - DNA, 7 bp, Unknown
  misc_feature (1)..( 7): Result.005 file - promoters50/4701809
aaattaa

SEQ ID NO: 187461 - DNA, 7 bp, Unknown
  misc_feature (1)..( 7): Result.005 file - promoters50/4701809
aaattaa

SEQ ID NO: 187462 - DNA, 7 bp, Unknown
  misc_feature (1)..( 7): Result.005 file - promoters50/4701809
caattaa

SEQ ID NO: 187463 - DNA, 8 bp, Unknown
  misc_feature (1)..( 8): Result.005 file - promoters50/4701809
aaagttat

SEQ ID NO: 187464 - DNA, 8 bp, Unknown
  misc_feature (1)..( 8): Result.005 file - promoters50/4701809
aaaattac

SEQ ID NO: 187465 - DNA, 8 bp, Unknown
  misc_feature (1)..( 8): Result.005 file - promoters50/4701809
ttagttat

SEQ ID NO: 187466 - DNA, 12 bp, Unknown
  misc_feature (1)..( 12): Result.005 file - promoters50/4701809
taaatttatcac

SEQ ID NO: 187467 - DNA, 12 bp, Unknown
  misc_feature (1)..( 12): Result.005 file - promoters50/4701809
agaatatatgaa

SEQ ID NO: 187468 - DNA, 12 bp, Unknown
  misc_feature (1)..( 12): Result.005 file - promoters50/4701809
ttaataaactta

SEQ ID NO: 187469 - DNA, 12 bp, Unknown
  misc_feature (1)..( 12): Result.005 file - promoters50/4701809
aaaattaaaaca

SEQ ID NO: 187470 - DNA, 12 bp, Unknown
  misc_feature (1)..( 12): Result.005 file - promoters50/4701809
caaacttgtcaa

SEQ ID NO: 187471 - DNA, 12 bp, Unknown
  misc_feature (1)..( 12): Result.005 file - promoters50/4701809
tagatagactat

SEQ ID NO: 187472 - DNA, 11 bp, Unknown
  misc_feature (1)..( 11): Result.005 file - promoters50/4701809
tatgattaatc

SEQ ID NO: 187473 - DNA, 11 bp, Unknown
  misc_feature (1)..( 11): Result.005 file - promoters50/4701809
ttaaattaata

SEQ ID NO: 187474 - DNA, 11 bp, Unknown
  misc_feature (1)..( 11): Result.005 file - promoters50/4701809
ataaagtaatg

SEQ ID NO: 187475 - DNA, 11 bp, Unknown
  misc_feature (1)..( 11): Result.005 file - promoters50/4701809
gtatgttaata

SEQ ID NO: 187476 - DNA, 11 bp, Unknown
  misc_feature (1)..( 11): Result.005 file - promoters50/4701809
caaaagtaaat

SEQ ID NO: 187477 - DNA, 11 bp, Unknown
  misc_feature (1)..( 11): Result.005 file - promoters50/4701809
atagagtaaac

SEQ ID NO: 187478 - DNA, 12 bp, Unknown
  misc_feature (1)..( 12): Result.005 file - promoters50/4701809
taataagttgtg

SEQ ID NO: 187479 - DNA, 12 bp, Unknown
  misc_feature (1)..( 12): Result.005 file - promoters50/4701809
ttctaaattgca

SEQ ID NO: 187480 - DNA, 12 bp, Unknown
  misc_feature (1)..( 12): Result.005 file - promoters50/4701809
ttcaaaatttat

SEQ ID NO: 187481 - DNA, 12 bp, Unknown
  misc_feature (1)..( 12): Result.005 file - promoters50/4701809
tacaagattata

SEQ ID NO: 187482 - DNA, 12 bp, Unknown
  misc_feature (1)..( 12): Result.005 file - promoters50/4701809
tgaaaaattcat

SEQ ID NO: 187483 - DNA, 12 bp, Unknown
  misc_feature (1)..( 12): Result.005 file - promoters50/4701809
gtatacatcaaa

SEQ ID NO: 187484 - DNA, 11 bp, Unknown
  misc_feature (1)..( 11): Result.005 file - promoters50/4701809
tgggtttttgg

SEQ ID NO: 187485 - DNA, 11 bp, Unknown
  misc_feature (1)..( 11): Result.005 file - promoters50/4701809
tttttttttgt

SEQ ID NO: 187486 - DNA, 11 bp, Unknown
  misc_feature (1)..( 11): Result.005 file - promoters50/4701809
tttgtttttac

SEQ ID NO: 187487 - DNA, 11 bp, Unknown
  misc_feature (1)..( 11): Result.005 file - promoters50/4701809
ttcgttgtgta

SEQ ID NO: 187488 - DNA, 11 bp, Unknown
  misc_feature (1)..( 11): Result.005 file - promoters50/4701809
atggtttggtt

SEQ ID NO: 187489 - DNA, 11 bp, Unknown
  misc_feature (1)..( 11): Result.005 file - promoters50/4701809
tcaattggttg

SEQ ID NO: 187490 - DNA, 9 bp, Unknown
  misc_feature (1)..( 9): Result.005 file - promoters50/4702444
gaagatttc

SEQ ID NO: 187491 - DNA, 9 bp, Unknown
  misc_feature (1)..( 9): Result.005 file - promoters50/4702444
gaaaattct

SEQ ID NO: 187492 - DNA, 9 bp, Unknown
  misc_feature (1)..( 9): Result.005 file - promoters50/4702444
gaaagtctt

SEQ ID NO: 187493 - DNA, 9 bp, Unknown
  misc_feature (1)..( 9): Result.005 file - promoters50/4702444
ttaaaatta

SEQ ID NO: 187494 - DNA, 9 bp, Unknown
  misc_feature (1)..( 9): Result.005 file - promoters50/4702444
ataaagtta

SEQ ID NO: 187495 - DNA, 9 bp, Unknown
  misc_feature (1)..( 9): Result.005 file - promoters50/4702444
ttacaattt

SEQ ID NO: 187496 - DNA, 11 bp, Unknown
  misc_feature (1)..( 11): Result.005 file - promoters50/4702444
cggaaagtata

SEQ ID NO: 187497 - DNA, 11 bp, Unknown
  misc_feature (1)..( 11): Result.005 file - promoters50/4702444
cggaaagtctt

SEQ ID NO: 187498 - DNA, 11 bp, Unknown
  misc_feature (1)..( 11): Result.005 file - promoters50/4702444
cgaaaattctt

SEQ ID NO: 187499 - DNA, 10 bp, Unknown
  misc_feature (1)..( 10): Result.005 file - promoters50/4702444
attaatcatt

SEQ ID NO: 187500 - DNA, 10 bp, Unknown
  misc_feature (1)..( 10): Result.005 file - promoters50/4702444
attgatccgt

SEQ ID NO: 187501 - DNA, 10 bp, Unknown
  misc_feature (1)..( 10): Result.005 file - promoters50/4702444
tttactcata

SEQ ID NO: 187502 - DNA, 10 bp, Unknown
  misc_feature (1)..( 10): Result.005 file - promoters50/4702444
agttctcata

SEQ ID NO: 187503 - DNA, 13 bp, Unknown
  misc_feature (1)..( 13): Result.005 file - promoters50/4702444
ttttactttactt

SEQ ID NO: 187504 - DNA, 13 bp, Unknown
  misc_feature (1)..( 13): Result.005 file - promoters50/4702444
atttccttctcaa

SEQ ID NO: 187505 - DNA, 13 bp, Unknown
  misc_feature (1)..( 13): Result.005 file - promoters50/4702444
tttttcttttctt

SEQ ID NO: 187506 - DNA, 10 bp, Unknown
  misc_feature (1)..( 10): Result.005 file - promoters50/4702444
ttttacaaat

SEQ ID NO: 187507 - DNA, 10 bp, Unknown
  misc_feature (1)..( 10): Result.005 file - promoters50/4702444
ttttgcaatt

SEQ ID NO: 187508 - DNA, 10 bp, Unknown
  misc_feature (1)..( 10): Result.005 file - promoters50/4702444
gtttgaaatt

SEQ ID NO: 187509 - DNA, 8 bp, Unknown
  misc_feature (1)..( 8): Result.005 file - promoters50/4702444
tttcgaaa

SEQ ID NO: 187510 - DNA, 8 bp, Unknown
  misc_feature (1)..( 8): Result.005 file - promoters50/4702444
tttagaaa

SEQ ID NO: 187511 - DNA, 8 bp, Unknown
  misc_feature (1)..( 8): Result.005 file - promoters50/4702444
tttctaaa

SEQ ID NO: 187512 - DNA, 11 bp, Unknown
  misc_feature (1)..( 11): Result.005 file - promoters50/4702444
gaagaaaccaa

SEQ ID NO: 187513 - DNA, 11 bp, Unknown
  misc_feature (1)..( 11): Result.005 file - promoters50/4702444
gaagaaaataa

SEQ ID NO: 187514 - DNA, 11 bp, Unknown
  misc_feature (1)..( 11): Result.005 file - promoters50/4702444
ttagaaactaa

SEQ ID NO: 187515 - DNA, 8 bp, Unknown
  misc_feature (1)..( 8): Result.005 file - promoters50/4766314
tatgttat

SEQ ID NO: 187516 - DNA, 8 bp, Unknown
  misc_feature (1)..( 8): Result.005 file - promoters50/4766314
aatggtat

SEQ ID NO: 187517 - DNA, 8 bp, Unknown
  misc_feature (1)..( 8): Result.005 file - promoters50/4766314
tatgttaa

SEQ ID NO: 187518 - DNA, 9 bp, Unknown
  misc_feature (1)..( 9): Result.005 file - promoters50/4766314
ccgacgaaa

SEQ ID NO: 187519 - DNA, 9 bp, Unknown
  misc_feature (1)..( 9): Result.005 file - promoters50/4766314
acgaagaat

SEQ ID NO: 187520 - DNA, 9 bp, Unknown
  misc_feature (1)..( 9): Result.005 file - promoters50/4766314
acgaagtaa

SEQ ID NO: 187521 - DNA, 9 bp, Unknown
  misc_feature (1)..( 9): Result.005 file - promoters50/4766314
tcgaattaa

SEQ ID NO: 187522 - DNA, 8 bp, Unknown
  misc_feature (1)..( 8): Result.005 file - promoters50/4766314
aacaatga

SEQ ID NO: 187523 - DNA, 8 bp, Unknown
  misc_feature (1)..( 8): Result.005 file - promoters50/4766314
aactatgg

SEQ ID NO: 187524 - DNA, 8 bp, Unknown
  misc_feature (1)..( 8): Result.005 file - promoters50/4766314
aaaaatat

SEQ ID NO: 187525 - DNA, 10 bp, Unknown
  misc_feature (1)..( 10): Result.005 file - promoters50/4766314
aatgacattt

SEQ ID NO: 187526 - DNA, 10 bp, Unknown
  misc_feature (1)..( 10): Result.005 file - promoters50/4766314
aatgagattt

SEQ ID NO: 187527 - DNA, 10 bp, Unknown
  misc_feature (1)..( 10): Result.005 file - promoters50/4766314
aattagattt

SEQ ID NO: 187528 - DNA, 13 bp, Unknown
  misc_feature (1)..( 13): Result.005 file - promoters50/4766320
aaaatttcaaatg

SEQ ID NO: 187529 - DNA, 13 bp, Unknown
  misc_feature (1)..( 13): Result.005 file - promoters50/4766320
ttaatttcaatct

SEQ ID NO: 187530 - DNA, 14 bp, Unknown
  misc_feature (1)..( 14): Result.005 file - promoters50/4766320
ctattttccaatga

SEQ ID NO: 187531 - DNA, 14 bp, Unknown
  misc_feature (1)..( 14): Result.005 file - promoters50/4766320
ctaatttccaaaga

SEQ ID NO: 187532 - DNA, 14 bp, Unknown
  misc_feature (1)..( 14): Result.005 file - promoters50/4766320
ttaatttggaatct

SEQ ID NO: 187533 - DNA, 14 bp, Unknown
  misc_feature (1)..( 14): Result.005 file - promoters50/4766320
ttaattagtaaaga

SEQ ID NO: 187534 - DNA, 16 bp, Unknown
  misc_feature (1)..( 16): Result.005 file - promoters50/4766320
ttcctttctttatata

SEQ ID NO: 187535 - DNA, 16 bp, Unknown
  misc_feature (1)..( 16): Result.005 file - promoters50/4766320
aagttattattatata

SEQ ID NO: 187536 - DNA, 16 bp, Unknown
  misc_feature (1)..( 16): Result.005 file - promoters50/4766320
tcccacctactatata

SEQ ID NO: 187537 - DNA, 16 bp, Unknown
  misc_feature (1)..( 16): Result.005 file - promoters50/4766320
ttcctttctttataaa

SEQ ID NO: 187538 - DNA, 16 bp, Unknown
  misc_feature (1)..( 16): Result.005 file - promoters50/4766320
cttctccgtctatata

SEQ ID NO: 187539 - DNA, 16 bp, Unknown
  misc_feature (1)..( 16): Result.005 file - promoters50/4766320
cctaaatatctacata

SEQ ID NO: 187540 - DNA, 15 bp, Unknown
  misc_feature (1)..( 15): Result.005 file - promoters50/4766324
ttttttcattgtagt

SEQ ID NO: 187541 - DNA, 15 bp, Unknown
  misc_feature (1)..( 15): Result.005 file - promoters50/4766324
gtttctcattaattg

SEQ ID NO: 187542 - DNA, 15 bp, Unknown
  misc_feature (1)..( 15): Result.005 file - promoters50/4766324
atttttttaatcaag

SEQ ID NO: 187543 - DNA, 15 bp, Unknown
  misc_feature (1)..( 15): Result.005 file - promoters50/4766324
acagttcattgaaga

SEQ ID NO: 187544 - DNA, 15 bp, Unknown
  misc_feature (1)..( 15): Result.005 file - promoters50/4766324
aagttttattgtagt

SEQ ID NO: 187545 - DNA, 15 bp, Unknown
  misc_feature (1)..( 15): Result.005 file - promoters50/4766324
gtttctttttgcagt

SEQ ID NO: 187546 - DNA, 15 bp, Unknown
  misc_feature (1)..( 15): Result.005 file - promoters50/4766324
actttttaacacttc

SEQ ID NO: 187547 - DNA, 16 bp, Unknown
  misc_feature (1)..( 16): Result.005 file - promoters50/4766324
actatataatggtagc

SEQ ID NO: 187548 - DNA, 16 bp, Unknown
  misc_feature (1)..( 16): Result.005 file - promoters50/4766324
tctatataatagtagc

SEQ ID NO: 187549 - DNA, 16 bp, Unknown
  misc_feature (1)..( 16): Result.005 file - promoters50/4766324
ctaatataaaacaaac

SEQ ID NO: 187550 - DNA, 16 bp, Unknown
  misc_feature (1)..( 16): Result.005 file - promoters50/4766324
actatatatacatatc

SEQ ID NO: 187551 - DNA, 16 bp, Unknown
  misc_feature (1)..( 16): Result.005 file - promoters50/4766324
tgtatatatacccttc

SEQ ID NO: 187552 - DNA, 16 bp, Unknown
  misc_feature (1)..( 16): Result.005 file - promoters50/4766324
ccaatataatctcttt

SEQ ID NO: 187553 - DNA, 15 bp, Unknown
  misc_feature (1)..( 15): Result.005 file - promoters50/4766324
gttagatgttttttt

SEQ ID NO: 187554 - DNA, 15 bp, Unknown
  misc_feature (1)..( 15): Result.005 file - promoters50/4766324
agaatttgttttctc

SEQ ID NO: 187555 - DNA, 15 bp, Unknown
  misc_feature (1)..( 15): Result.005 file - promoters50/4766324
attttttggtttctc

SEQ ID NO: 187556 - DNA, 15 bp, Unknown
  misc_feature (1)..( 15): Result.005 file - promoters50/4766324
atagtttctttttgc

SEQ ID NO: 187557 - DNA, 15 bp, Unknown
  misc_feature (1)..( 15): Result.005 file - promoters50/4766324
ataatttcttactag

SEQ ID NO: 187558 - DNA, 15 bp, Unknown
  misc_feature (1)..( 15): Result.005 file - promoters50/4766324
ttgaatttttttaat

SEQ ID NO: 187559 - DNA, 10 bp, Unknown
  misc_feature (1)..( 10): Result.005 file - promoters50/4766335
agaaatgatg

SEQ ID NO: 187560 - DNA, 10 bp, Unknown
  misc_feature (1)..( 10): Result.005 file - promoters50/4766335
ttaaatgaag

SEQ ID NO: 187561 - DNA, 10 bp, Unknown
  misc_feature (1)..( 10): Result.005 file - promoters50/4766335
aataatgatg

SEQ ID NO: 187562 - DNA, 10 bp, Unknown
  misc_feature (1)..( 10): Result.005 file - promoters50/4766335
ttacatgaac

SEQ ID NO: 187563 - DNA, 10 bp, Unknown
  misc_feature (1)..( 10): Result.005 file - promoters50/4766335
gacaatgaat

SEQ ID NO: 187564 - DNA, 13 bp, Unknown
  misc_feature (1)..( 13): Result.005 file - promoters50/4766335
cttctataaatac

SEQ ID NO: 187565 - DNA, 13 bp, Unknown
  misc_feature (1)..( 13): Result.005 file - promoters50/4766335
agtctataaatgt

SEQ ID NO: 187566 - DNA, 13 bp, Unknown
  misc_feature (1)..( 13): Result.005 file - promoters50/4766335
cgtttataaaagc

SEQ ID NO: 187567 - DNA, 13 bp, Unknown
  misc_feature (1)..( 13): Result.005 file - promoters50/4766335
cttttatttattt

SEQ ID NO: 187568 - DNA, 13 bp, Unknown
  misc_feature (1)..( 13): Result.005 file - promoters50/4766335
taagtatatatac

SEQ ID NO: 187569 - DNA, 12 bp, Unknown
  misc_feature (1)..( 12): Result.005 file - promoters50/4766335
aaagtttgtttc

SEQ ID NO: 187570 - DNA, 12 bp, Unknown
  misc_feature (1)..( 12): Result.005 file - promoters50/4766335
aaaatttggtcc

SEQ ID NO: 187571 - DNA, 12 bp, Unknown
  misc_feature (1)..( 12): Result.005 file - promoters50/4766335
attatttggatt

SEQ ID NO: 187572 - DNA, 12 bp, Unknown
  misc_feature (1)..( 12): Result.005 file - promoters50/4766335
atattttgattt

SEQ ID NO: 187573 - DNA, 12 bp, Unknown
  misc_feature (1)..( 12): Result.005 file - promoters50/4766335
aaaattaaaata

SEQ ID NO: 187574 - DNA, 10 bp, Unknown
  misc_feature (1)..( 10): Result.005 file - promoters50/4766335
tattctttga

SEQ ID NO: 187575 - DNA, 10 bp, Unknown
  misc_feature (1)..( 10): Result.005 file - promoters50/4766335
atttctttca

SEQ ID NO: 187576 - DNA, 10 bp, Unknown
  misc_feature (1)..( 10): Result.005 file - promoters50/4766335
gattcttcga

SEQ ID NO: 187577 - DNA, 10 bp, Unknown
  misc_feature (1)..( 10): Result.005 file - promoters50/4766335
gatacttgtc

SEQ ID NO: 187578 - DNA, 10 bp, Unknown
  misc_feature (1)..( 10): Result.005 file - promoters50/4766335
gcatctttca

SEQ ID NO: 187579 - DNA, 11 bp, Unknown
  misc_feature (1)..( 11): Result.005 file - promoters50/4766350
atagcaaaaat

SEQ ID NO: 187580 - DNA, 11 bp, Unknown
  misc_feature (1)..( 11): Result.005 file - promoters50/4766350
atagcaaatct

SEQ ID NO: 187581 - DNA, 11 bp, Unknown
  misc_feature (1)..( 11): Result.005 file - promoters50/4766350
tcctcaaaagc

SEQ ID NO: 187582 - DNA, 6 bp, Unknown
  misc_feature (1)..( 6): Result.005 file - promoters50/4766350
aaaaga

SEQ ID NO: 187583 - DNA, 6 bp, Unknown
  misc_feature (1)..( 6): Result.005 file - promoters50/4766350
aaaaga

SEQ ID NO: 187584 - DNA, 6 bp, Unknown
  misc_feature (1)..( 6): Result.005 file - promoters50/4766350
aaaaga

SEQ ID NO: 187585 - DNA, 8 bp, Unknown
  misc_feature (1)..( 8): Result.005 file - promoters50/4766350
ctgagaac

SEQ ID NO: 187586 - DNA, 8 bp, Unknown
  misc_feature (1)..( 8): Result.005 file - promoters50/4766350
ttgaaaac

SEQ ID NO: 187587 - DNA, 8 bp, Unknown
  misc_feature (1)..( 8): Result.005 file - promoters50/4766350
ctgagaag

SEQ ID NO: 187588 - DNA, 9 bp, Unknown
  misc_feature (1)..( 9): Result.005 file - promoters50/4766350
aaaaatgat

SEQ ID NO: 187589 - DNA, 9 bp, Unknown
  misc_feature (1)..( 9): Result.005 file - promoters50/4766350
caaaaagat

SEQ ID NO: 187590 - DNA, 9 bp, Unknown
  misc_feature (1)..( 9): Result.005 file - promoters50/4766350
caaaaaacc

SEQ ID NO: 187591 - DNA, 9 bp, Unknown
  misc_feature (1)..( 9): Result.005 file - promoters50/4766350
ctaattgag

SEQ ID NO: 187592 - DNA, 9 bp, Unknown
  misc_feature (1)..( 9): Result.005 file - promoters50/4766350
ctaatggag

SEQ ID NO: 187593 - DNA, 9 bp, Unknown
  misc_feature (1)..( 9): Result.005 file - promoters50/4766350
ttaatggtg

SEQ ID NO: 187594 - DNA, 8 bp, Unknown
  misc_feature (1)..( 8): Result.005 file - promoters50/4766353
tatagtaa

SEQ ID NO: 187595 - DNA, 8 bp, Unknown
  misc_feature (1)..( 8): Result.005 file - promoters50/4766353
tatggtac

SEQ ID NO: 187596 - DNA, 8 bp, Unknown
  misc_feature (1)..( 8): Result.005 file - promoters50/4766353
tatattaa

SEQ ID NO: 187597 - DNA, 10 bp, Unknown
  misc_feature (1)..( 10): Result.005 file - promoters50/4766353
ccttaaaaat

SEQ ID NO: 187598 - DNA, 10 bp, Unknown
  misc_feature (1)..( 10): Result.005 file - promoters50/4766353
ttgtaataat

SEQ ID NO: 187599 - DNA, 10 bp, Unknown
  misc_feature (1)..( 10): Result.005 file - promoters50/4766353
ttgtgatatt

SEQ ID NO: 187600 - DNA, 7 bp, Unknown
  misc_feature (1)..( 7): Result.005 file - promoters50/4766353
tttctaa

SEQ ID NO: 187601 - DNA, 7 bp, Unknown
  misc_feature (1)..( 7): Result.005 file - promoters50/4766353
tttataa

SEQ ID NO: 187602 - DNA, 7 bp, Unknown
  misc_feature (1)..( 7): Result.005 file - promoters50/4766353
tttgtaa

SEQ ID NO: 187603 - DNA, 12 bp, Unknown
  misc_feature (1)..( 12): Result.005 file - promoters50/4766365
caagtaagtagg

SEQ ID NO: 187604 - DNA, 12 bp, Unknown
  misc_feature (1)..( 12): Result.005 file - promoters50/4766365
aaagtaaatatt

SEQ ID NO: 187605 - DNA, 12 bp, Unknown
  misc_feature (1)..( 12): Result.005 file - promoters50/4766365
aaattaaacatt

SEQ ID NO: 187606 - DNA, 12 bp, Unknown
  misc_feature (1)..( 12): Result.005 file - promoters50/4766365
gaatcaaaaaat

SEQ ID NO: 187607 - DNA, 11 bp, Unknown
  misc_feature (1)..( 11): Result.005 file - promoters50/4766372
aatttacttat

SEQ ID NO: 187608 - DNA, 11 bp, Unknown
  misc_feature (1)..( 11): Result.005 file - promoters50/4766372
gttttccttat

SEQ ID NO: 187609 - DNA, 11 bp, Unknown
  misc_feature (1)..( 11): Result.005 file - promoters50/4766372
gttttccgtta

SEQ ID NO: 187610 - DNA, 10 bp, Unknown
  misc_feature (1)..( 10): Result.005 file - promoters50/4766372
aaaaaattta

SEQ ID NO: 187611 - DNA, 10 bp, Unknown
  misc_feature (1)..( 10): Result.005 file - promoters50/4766372
aaaaaagact

SEQ ID NO: 187612 - DNA, 10 bp, Unknown
  misc_feature (1)..( 10): Result.005 file - promoters50/4766372
aaagatttaa

SEQ ID NO: 187613 - DNA, 8 bp, Unknown
  misc_feature (1)..( 8): Result.005 file - promoters50/4766372
gaacttta

SEQ ID NO: 187614 - DNA, 8 bp, Unknown
  misc_feature (1)..( 8): Result.005 file - promoters50/4766372
gaattttt

SEQ ID NO: 187615 - DNA, 8 bp, Unknown
  misc_feature (1)..( 8): Result.005 file - promoters50/4766372
gcattttt

SEQ ID NO: 187616 - DNA, 13 bp, Unknown
  misc_feature (1)..( 13): Result.005 file - promoters50/4766376
tctgaaaacaatg

SEQ ID NO: 187617 - DNA, 13 bp, Unknown
  misc_feature (1)..( 13): Result.005 file - promoters50/4766376
cgtgataacacgt

SEQ ID NO: 187618 - DNA, 13 bp, Unknown
  misc_feature (1)..( 13): Result.005 file - promoters50/4766376
agaaaaaacactt

SEQ ID NO: 187619 - DNA, 13 bp, Unknown
  misc_feature (1)..( 13): Result.005 file - promoters50/4766376
cgtggtaatgtgt

SEQ ID NO: 187620 - DNA, 13 bp, Unknown
  misc_feature (1)..( 13): Result.005 file - promoters50/4766376
aaataaaaatact

SEQ ID NO: 187621 - DNA, 13 bp, Unknown
  misc_feature (1)..( 13): Result.005 file - promoters50/4766376
tgtgctaagtaac

SEQ ID NO: 187622 - DNA, 9 bp, Unknown
  misc_feature (1)..( 9): Result.005 file - promoters50/4766376
ttatatatc

SEQ ID NO: 187623 - DNA, 9 bp, Unknown
  misc_feature (1)..( 9): Result.005 file - promoters50/4766376
gtatatata

SEQ ID NO: 187624 - DNA, 9 bp, Unknown
  misc_feature (1)..( 9): Result.005 file - promoters50/4766376
ctataaata

SEQ ID NO: 187625 - DNA, 9 bp, Unknown
  misc_feature (1)..( 9): Result.005 file - promoters50/4766376
atataaata

SEQ ID NO: 187626 - DNA, 9 bp, Unknown
  misc_feature (1)..( 9): Result.005 file - promoters50/4766376
ctataaata

SEQ ID NO: 187627 - DNA, 9 bp, Unknown
  misc_feature (1)..( 9): Result.005 file - promoters50/4766376
ctataaaaa

SEQ ID NO: 187628 - DNA, 9 bp, Unknown
  misc_feature (1)..( 9): Result.005 file - promoters50/4766376
ctttaaata

SEQ ID NO: 187629 - DNA, 9 bp, Unknown
  misc_feature (1)..( 9): Result.005 file - promoters50/4766376
ctataaata

SEQ ID NO: 187630 - DNA, 9 bp, Unknown
  misc_feature (1)..( 9): Result.005 file - promoters50/4766376
atataaata

SEQ ID NO: 187631 - DNA, 9 bp, Unknown
  misc_feature (1)..( 9): Result.005 file - promoters50/4766376
gtatatata

SEQ ID NO: 187632 - DNA, 9 bp, Unknown
  misc_feature (1)..( 9): Result.005 file - promoters50/4766376
ctataaata

SEQ ID NO: 187633 - DNA, 9 bp, Unknown
  misc_feature (1)..( 9): Result.005 file - promoters50/4766376
ctataaaaa

SEQ ID NO: 187634 - DNA, 9 bp, Unknown
  misc_feature (1)..( 9): Result.005 file - promoters50/4766376
ctttaaata

SEQ ID NO: 187635 - DNA, 13 bp, Unknown
  misc_feature (1)..( 13): Result.005 file - promoters50/4766391
gaaatatagaacc

SEQ ID NO: 187636 - DNA, 13 bp, Unknown
  misc_feature (1)..( 13): Result.005 file - promoters50/4766391
aaaaaataacaaa

SEQ ID NO: 187637 - DNA, 13 bp, Unknown
  misc_feature (1)..( 13): Result.005 file - promoters50/4766391
aaaaaacaaaaaa

SEQ ID NO: 187638 - DNA, 17 bp, Unknown
  misc_feature (1)..( 17): Result.005 file - promoters50/4766395
ttcaaagaaaaattctt

SEQ ID NO: 187639 - DNA, 17 bp, Unknown
  misc_feature (1)..( 17): Result.005 file - promoters50/4766395
catatacaaaaattagc

SEQ ID NO: 187640 - DNA, 17 bp, Unknown
  misc_feature (1)..( 17): Result.005 file - promoters50/4766395
atttaacataaattaac

SEQ ID NO: 187641 - DNA, 17 bp, Unknown
  misc_feature (1)..( 17): Result.005 file - promoters50/4766395
attttacagaaatattc

SEQ ID NO: 187642 - DNA, 17 bp, Unknown
  misc_feature (1)..( 17): Result.005 file - promoters50/4766395
tagttatataatttaaa

SEQ ID NO: 187643 - DNA, 17 bp, Unknown
  misc_feature (1)..( 17): Result.005 file - promoters50/4766395
gaaacaaggatattatt

SEQ ID NO: 187644 - DNA, 15 bp, Unknown
  misc_feature (1)..( 15): Result.005 file - promoters50/4766395
gaattatttaattta

SEQ ID NO: 187645 - DNA, 15 bp, Unknown
  misc_feature (1)..( 15): Result.005 file - promoters50/4766395
atttaacataaatta

SEQ ID NO: 187646 - DNA, 15 bp, Unknown
  misc_feature (1)..( 15): Result.005 file - promoters50/4766395
tagttatataattta

SEQ ID NO: 187647 - DNA, 15 bp, Unknown
  misc_feature (1)..( 15): Result.005 file - promoters50/4766395
catatacaaaaatta

SEQ ID NO: 187648 - DNA, 15 bp, Unknown
  misc_feature (1)..( 15): Result.005 file - promoters50/4766395
attttacagaaatat

SEQ ID NO: 187649 - DNA, 15 bp, Unknown
  misc_feature (1)..( 15): Result.005 file - promoters50/4766395
caaggatattattac

SEQ ID NO: 187650 - DNA, 9 bp, Unknown
  misc_feature (1)..( 9): Result.005 file - promoters50/4766421
taatgattc

SEQ ID NO: 187651 - DNA, 9 bp, Unknown
  misc_feature (1)..( 9): Result.005 file - promoters50/4766421
aattgattc

SEQ ID NO: 187652 - DNA, 9 bp, Unknown
  misc_feature (1)..( 9): Result.005 file - promoters50/4766421
aatttattt

SEQ ID NO: 187653 - DNA, 7 bp, Unknown
  misc_feature (1)..( 7): Result.005 file - promoters50/4766421
caatatt

SEQ ID NO: 187654 - DNA, 7 bp, Unknown
  misc_feature (1)..( 7): Result.005 file - promoters50/4766421
caaaatt

SEQ ID NO: 187655 - DNA, 7 bp, Unknown
  misc_feature (1)..( 7): Result.005 file - promoters50/4766421
taaaatt

SEQ ID NO: 187656 - DNA, 7 bp, Unknown
  misc_feature (1)..( 7): Result.005 file - promoters50/4766421
atgtttt

SEQ ID NO: 187657 - DNA, 7 bp, Unknown
  misc_feature (1)..( 7): Result.005 file - promoters50/4766421
atgcttt

SEQ ID NO: 187658 - DNA, 7 bp, Unknown
  misc_feature (1)..( 7): Result.005 file - promoters50/4766421
atgtttt

SEQ ID NO: 187659 - DNA, 8 bp, Unknown
  misc_feature (1)..( 8): Result.005 file - promoters50/4766421
ttacaata

SEQ ID NO: 187660 - DNA, 8 bp, Unknown
  misc_feature (1)..( 8): Result.005 file - promoters50/4766421
ttaaaatt

SEQ ID NO: 187661 - DNA, 8 bp, Unknown
  misc_feature (1)..( 8): Result.005 file - promoters50/4766421
tcaaaatt

SEQ ID NO: 187662 - DNA, 8 bp, Unknown
  misc_feature (1)..( 8): Result.005 file - promoters50/4766425
ccgggctg

SEQ ID NO: 187663 - DNA, 8 bp, Unknown
  misc_feature (1)..( 8): Result.005 file - promoters50/4766425
gcggtctg

SEQ ID NO: 187664 - DNA, 8 bp, Unknown
  misc_feature (1)..( 8): Result.005 file - promoters50/4766425
gcggtcac

SEQ ID NO: 187665 - DNA, 8 bp, Unknown
  misc_feature (1)..( 8): Result.005 file - promoters50/4766429
taagaaac

SEQ ID NO: 187666 - DNA, 8 bp, Unknown
  misc_feature (1)..( 8): Result.005 file - promoters50/4766429
aaagaaac

SEQ ID NO: 187667 - DNA, 8 bp, Unknown
  misc_feature (1)..( 8): Result.005 file - promoters50/4766429
taagaatt

SEQ ID NO: 187668 - DNA, 9 bp, Unknown
  misc_feature (1)..( 9): Result.005 file - promoters50/4766458
aaatttgac

SEQ ID NO: 187669 - DNA, 9 bp, Unknown
  misc_feature (1)..( 9): Result.005 file - promoters50/4766458
aaatttgac

SEQ ID NO: 187670 - DNA, 9 bp, Unknown
  misc_feature (1)..( 9): Result.005 file - promoters50/4766458
caatttttt

SEQ ID NO: 187671 - DNA, 8 bp, Unknown
  misc_feature (1)..( 8): Result.005 file - promoters50/4766458
attataat

SEQ ID NO: 187672 - DNA, 8 bp, Unknown
  misc_feature (1)..( 8): Result.005 file - promoters50/4766458
attatata

SEQ ID NO: 187673 - DNA, 8 bp, Unknown
  misc_feature (1)..( 8): Result.005 file - promoters50/4766458
attctaat

SEQ ID NO: 187674 - DNA, 7 bp, Unknown
  misc_feature (1)..( 7): Result.005 file - promoters50/4766458
aaaaagt

SEQ ID NO: 187675 - DNA, 7 bp, Unknown
  misc_feature (1)..( 7): Result.005 file - promoters50/4766458
aaacagt

SEQ ID NO: 187676 - DNA, 7 bp, Unknown
  misc_feature (1)..( 7): Result.005 file - promoters50/4766458
aaattaa

SEQ ID NO: 187677 - DNA, 12 bp, Unknown
  misc_feature (1)..( 12): Result.005 file - promoters50/4766458
ataaaaataaaa

SEQ ID NO: 187678 - DNA, 12 bp, Unknown
  misc_feature (1)..( 12): Result.005 file - promoters50/4766458
accaaattaaaa

SEQ ID NO: 187679 - DNA, 12 bp, Unknown
  misc_feature (1)..( 12): Result.005 file - promoters50/4766458
accagattctaa

SEQ ID NO: 187680 - DNA, 11 bp, Unknown
  misc_feature (1)..( 11): Result.005 file - promoters50/4766477
actttatgggc

SEQ ID NO: 187681 - DNA, 11 bp, Unknown
  misc_feature (1)..( 11): Result.005 file - promoters50/4766477
aatttttggtc

SEQ ID NO: 187682 - DNA, 11 bp, Unknown
  misc_feature (1)..( 11): Result.005 file - promoters50/4766477
aatatttgggc

SEQ ID NO: 187683 - DNA, 11 bp, Unknown
  misc_feature (1)..( 11): Result.005 file - promoters50/4766477
aatagttgaca

SEQ ID NO: 187684 - DNA, 11 bp, Unknown
  misc_feature (1)..( 11): Result.005 file - promoters50/4766477
aacctttgggc

SEQ ID NO: 187685 - DNA, 11 bp, Unknown
  misc_feature (1)..( 11): Result.005 file - promoters50/4766477
catttttcagt

SEQ ID NO: 187686 - DNA, 10 bp, Unknown
  misc_feature (1)..( 10): Result.005 file - promoters50/4766477
cagttttttc

SEQ ID NO: 187687 - DNA, 10 bp, Unknown
  misc_feature (1)..( 10): Result.005 file - promoters50/4766477
atgtttttag

SEQ ID NO: 187688 - DNA, 10 bp, Unknown
  misc_feature (1)..( 10): Result.005 file - promoters50/4766477
tagtctttgc

SEQ ID NO: 187689 - DNA, 10 bp, Unknown
  misc_feature (1)..( 10): Result.005 file - promoters50/4766477
gtgtcttttg

SEQ ID NO: 187690 - DNA, 10 bp, Unknown
  misc_feature (1)..( 10): Result.005 file - promoters50/4766477
atgattttcc

SEQ ID NO: 187691 - DNA, 10 bp, Unknown
  misc_feature (1)..( 10): Result.005 file - promoters50/4766477
tactttttag

SEQ ID NO: 187692 - DNA, 11 bp, Unknown
  misc_feature (1)..( 11): Result.005 file - promoters50/4766477
aacaaaattaa

SEQ ID NO: 187693 - DNA, 11 bp, Unknown
  misc_feature (1)..( 11): Result.005 file - promoters50/4766477
gaaaaaaataa

SEQ ID NO: 187694 - DNA, 11 bp, Unknown
  misc_feature (1)..( 11): Result.005 file - promoters50/4766477
cacacaatttt

SEQ ID NO: 187695 - DNA, 11 bp, Unknown
  misc_feature (1)..( 11): Result.005 file - promoters50/4766477
aacaaaatgca

SEQ ID NO: 187696 - DNA, 11 bp, Unknown
  misc_feature (1)..( 11): Result.005 file - promoters50/4766477
aataaacttat

SEQ ID NO: 187697 - DNA, 11 bp, Unknown
  misc_feature (1)..( 11): Result.005 file - promoters50/4766477
tacaaacttta

SEQ ID NO: 187698 - DNA, 12 bp, Unknown
  misc_feature (1)..( 12): Result.005 file - promoters50/4766477
attaaaagtttt

SEQ ID NO: 187699 - DNA, 12 bp, Unknown
  misc_feature (1)..( 12): Result.005 file - promoters50/4766477
catataagtttg

SEQ ID NO: 187700 - DNA, 13 bp, Unknown
  misc_feature (1)..( 13): Result.005 file - promoters50/4766477
gtacaaacgttta

SEQ ID NO: 187701 - DNA, 13 bp, Unknown
  misc_feature (1)..( 13): Result.005 file - promoters50/4766477
attgaaaatttat

SEQ ID NO: 187702 - DNA, 13 bp, Unknown
  misc_feature (1)..( 13): Result.005 file - promoters50/4766477
tccaataatttac

SEQ ID NO: 187703 - DNA, 13 bp, Unknown
  misc_feature (1)..( 13): Result.005 file - promoters50/4766477
ggtaagacgatta

SEQ ID NO: 187704 - DNA, 13 bp, Unknown
  misc_feature (1)..( 13): Result.005 file - promoters50/4766477
taacaatatatat

SEQ ID NO: 187705 - DNA, 13 bp, Unknown
  misc_feature (1)..( 13): Result.005 file - promoters50/4766477
caacaatgtacaa

SEQ ID NO: 187706 - DNA, 13 bp, Unknown
  misc_feature (1)..( 13): Result.005 file - promoters50/4766477
taataatggttct

SEQ ID NO: 187707 - DNA, 13 bp, Unknown
  misc_feature (1)..( 13): Result.005 file - promoters50/4766477
caataatttacat

SEQ ID NO: 187708 - DNA, 13 bp, Unknown
  misc_feature (1)..( 13): Result.005 file - promoters50/4766477
tgaaaatttatac

SEQ ID NO: 187709 - DNA, 13 bp, Unknown
  misc_feature (1)..( 13): Result.005 file - promoters50/4766477
ttacaatttacaa

SEQ ID NO: 187710 - DNA, 8 bp, Unknown
  misc_feature (1)..( 8): Result.005 file - promoters50/4766481
attctgtg

SEQ ID NO: 187711 - DNA, 8 bp, Unknown
  misc_feature (1)..( 8): Result.005 file - promoters50/4766481
attttgtg

SEQ ID NO: 187712 - DNA, 8 bp, Unknown
  misc_feature (1)..( 8): Result.005 file - promoters50/4766481
attttgtt

SEQ ID NO: 187713 - DNA, 8 bp, Unknown
  misc_feature (1)..( 8): Result.005 file - promoters50/4766481
ctcaataa

SEQ ID NO: 187714 - DNA, 8 bp, Unknown
  misc_feature (1)..( 8): Result.005 file - promoters50/4766481
ctcaattt

SEQ ID NO: 187715 - DNA, 8 bp, Unknown
  misc_feature (1)..( 8): Result.005 file - promoters50/4766481
atcatttt

SEQ ID NO: 187716 - DNA, 10 bp, Unknown
  misc_feature (1)..( 10): Result.005 file - promoters50/4766490
aaaaaaaaga

SEQ ID NO: 187717 - DNA, 10 bp, Unknown
  misc_feature (1)..( 10): Result.005 file - promoters50/4766490
tttgaaaaga

SEQ ID NO: 187718 - DNA, 11 bp, Unknown
  misc_feature (1)..( 11): Result.005 file - promoters50/4766490
gaagaaacaga

SEQ ID NO: 187719 - DNA, 6 bp, Unknown
  misc_feature (1)..( 6): Result.005 file - promoters50/4766497
aagctt

SEQ ID NO: 187720 - DNA, 6 bp, Unknown
  misc_feature (1)..( 6): Result.005 file - promoters50/4766497
aagctt

SEQ ID NO: 187721 - DNA, 6 bp, Unknown
  misc_feature (1)..( 6): Result.005 file - promoters50/4766497
aagctt

SEQ ID NO: 187722 - DNA, 7 bp, Unknown
  misc_feature (1)..( 7): Result.005 file - promoters50/4766497
ttttttt

SEQ ID NO: 187723 - DNA, 7 bp, Unknown
  misc_feature (1)..( 7): Result.005 file - promoters50/4766497
tttattt

SEQ ID NO: 187724 - DNA, 7 bp, Unknown
  misc_feature (1)..( 7): Result.005 file - promoters50/4766497
attattt

SEQ ID NO: 187725 - DNA, 7 bp, Unknown
  misc_feature (1)..( 7): Result.005 file - promoters50/4766497
attattt

SEQ ID NO: 187726 - DNA, 10 bp, Unknown
  misc_feature (1)..( 10): Result.005 file - promoters50/4766497
ttaatattat

SEQ ID NO: 187727 - DNA, 10 bp, Unknown
  misc_feature (1)..( 10): Result.005 file - promoters50/4766497
ttaaaatttc

SEQ ID NO: 187728 - DNA, 10 bp, Unknown
  misc_feature (1)..( 10): Result.005 file - promoters50/4766497
tctatattat

SEQ ID NO: 187729 - DNA, 8 bp, Unknown
  misc_feature (1)..( 8): Result.005 file - promoters50/4766497
aaaggaac

SEQ ID NO: 187730 - DNA, 8 bp, Unknown
  misc_feature (1)..( 8): Result.005 file - promoters50/4766497
aaacgaat

SEQ ID NO: 187731 - DNA, 8 bp, Unknown
  misc_feature (1)..( 8): Result.005 file - promoters50/4766497
taacaaat

SEQ ID NO: 187732 - DNA, 11 bp, Unknown
  misc_feature (1)..( 11): Result.005 file - promoters50/4766497
taataacaaat

SEQ ID NO: 187733 - DNA, 11 bp, Unknown
  misc_feature (1)..( 11): Result.005 file - promoters50/4766497
taatatcaaag

SEQ ID NO: 187734 - DNA, 11 bp, Unknown
  misc_feature (1)..( 11): Result.005 file - promoters50/4766497
tcaaaacgaat

SEQ ID NO: 187735 - DNA, 7 bp, Unknown
  misc_feature (1)..( 7): Result.005 file - promoters50/4766497
aaagaag

SEQ ID NO: 187736 - DNA, 7 bp, Unknown
  misc_feature (1)..( 7): Result.005 file - promoters50/4766497
aaagaaa

SEQ ID NO: 187737 - DNA, 7 bp, Unknown
  misc_feature (1)..( 7): Result.005 file - promoters50/4766497
aaataag

SEQ ID NO: 187738 - DNA, 10 bp, Unknown
  misc_feature (1)..( 10): Result.005 file - promoters50/4766497
aaaaccaaaa

SEQ ID NO: 187739 - DNA, 10 bp, Unknown
  misc_feature (1)..( 10): Result.005 file - promoters50/4766497
aaaatcaaaa

SEQ ID NO: 187740 - DNA, 10 bp, Unknown
  misc_feature (1)..( 10): Result.005 file - promoters50/4766497
aatatcaaag

SEQ ID NO: 187741 - DNA, 8 bp, Unknown
  misc_feature (1)..( 8): Result.005 file - promoters50/4766500
atcacatt

SEQ ID NO: 187742 - DNA, 8 bp, Unknown
  misc_feature (1)..( 8): Result.005 file - promoters50/4766500
atcagatt

SEQ ID NO: 187743 - DNA, 8 bp, Unknown
  misc_feature (1)..( 8): Result.005 file - promoters50/4766500
accacatt

SEQ ID NO: 187744 - DNA, 12 bp, Unknown
  misc_feature (1)..( 12): Result.005 file - promoters50/4766524
tttgtagatttt

SEQ ID NO: 187745 - DNA, 12 bp, Unknown
  misc_feature (1)..( 12): Result.005 file - promoters50/4766524
agaagagatttt

SEQ ID NO: 187746 - DNA, 12 bp, Unknown
  misc_feature (1)..( 12): Result.005 file - promoters50/4766524
tttgaagatttg

SEQ ID NO: 187747 - DNA, 9 bp, Unknown
  misc_feature (1)..( 9): Result.005 file - promoters50/4766524
tttttcaaa

SEQ ID NO: 187748 - DNA, 9 bp, Unknown
  misc_feature (1)..( 9): Result.005 file - promoters50/4766524
ttttttaaa

SEQ ID NO: 187749 - DNA, 9 bp, Unknown
  misc_feature (1)..( 9): Result.005 file - promoters50/4766524
gatttgaat

SEQ ID NO: 187750 - DNA, 13 bp, Unknown
  misc_feature (1)..( 13): Result.005 file - promoters50/4766524
tttttataccatt

SEQ ID NO: 187751 - DNA, 13 bp, Unknown
  misc_feature (1)..( 13): Result.005 file - promoters50/4766524
tttttataacatt

SEQ ID NO: 187752 - DNA, 13 bp, Unknown
  misc_feature (1)..( 13): Result.005 file - promoters50/4766524
tatgtatgccaca

SEQ ID NO: 187753 - DNA, 9 bp, Unknown
  misc_feature (1)..( 9): Result.005 file - promoters50/4766524
aaacaaaaa

SEQ ID NO: 187754 - DNA, 9 bp, Unknown
  misc_feature (1)..( 9): Result.005 file - promoters50/4766524
aaacaaaag

SEQ ID NO: 187755 - DNA, 9 bp, Unknown
  misc_feature (1)..( 9): Result.005 file - promoters50/4766524
gaccaaaag

SEQ ID NO: 187756 - DNA, 9 bp, Unknown
  misc_feature (1)..( 9): Result.005 file - promoters50/4766524
tttgttttt

SEQ ID NO: 187757 - DNA, 9 bp, Unknown
  misc_feature (1)..( 9): Result.005 file - promoters50/4766524
tttatttat

SEQ ID NO: 187758 - DNA, 9 bp, Unknown
  misc_feature (1)..( 9): Result.005 file - promoters50/4766524
tttatatat

SEQ ID NO: 187759 - DNA, 8 bp, Unknown
  misc_feature (1)..( 8): Result.005 file - promoters50/4766524
atttttac

SEQ ID NO: 187760 - DNA, 8 bp, Unknown
  misc_feature (1)..( 8): Result.005 file - promoters50/4766524
attcttac

SEQ ID NO: 187761 - DNA, 8 bp, Unknown
  misc_feature (1)..( 8): Result.005 file - promoters50/4766524
attattat

SEQ ID NO: 187762 - DNA, 11 bp, Unknown
  misc_feature (1)..( 11): Result.005 file - promoters50/4766553
tctgataaata

SEQ ID NO: 187763 - DNA, 11 bp, Unknown
  misc_feature (1)..( 11): Result.005 file - promoters50/4766553
tctgataacaa

SEQ ID NO: 187764 - DNA, 11 bp, Unknown
  misc_feature (1)..( 11): Result.005 file - promoters50/4766553
aatgaaaacaa

SEQ ID NO: 187765 - DNA, 8 bp, Unknown
  misc_feature (1)..( 8): Result.005 file - promoters50/4766553
aacaacaa

SEQ ID NO: 187766 - DNA, 8 bp, Unknown
  misc_feature (1)..( 8): Result.005 file - promoters50/4766553
aacaacac

SEQ ID NO: 187767 - DNA, 8 bp, Unknown
  misc_feature (1)..( 8): Result.005 file - promoters50/4766553
ctcaacac

SEQ ID NO: 187768 - DNA, 8 bp, Unknown
  misc_feature (1)..( 8): Result.005 file - promoters50/4766553
gtagagaa

SEQ ID NO: 187769 - DNA, 8 bp, Unknown
  misc_feature (1)..( 8): Result.005 file - promoters50/4766553
gtagagaa

SEQ ID NO: 187770 - DNA, 8 bp, Unknown
  misc_feature (1)..( 8): Result.005 file - promoters50/4766553
atagagaa

SEQ ID NO: 187771 - DNA, 8 bp, Unknown
  misc_feature (1)..( 8): Result.005 file - promoters50/4766553
gagaagag

SEQ ID NO: 187772 - DNA, 8 bp, Unknown
  misc_feature (1)..( 8): Result.005 file - promoters50/4766553
aagaagaa

SEQ ID NO: 187773 - DNA, 8 bp, Unknown
  misc_feature (1)..( 8): Result.005 file - promoters50/4766553
aaggagaa

SEQ ID NO: 187774 - DNA, 12 bp, Unknown
  misc_feature (1)..( 12): Result.005 file - promoters50/4766578
taaatatttaag

SEQ ID NO: 187775 - DNA, 12 bp, Unknown
  misc_feature (1)..( 12): Result.005 file - promoters50/4766578
tccataattagt

SEQ ID NO: 187776 - DNA, 12 bp, Unknown
  misc_feature (1)..( 12): Result.005 file - promoters50/4766578
taaatacttaag

SEQ ID NO: 187777 - DNA, 12 bp, Unknown
  misc_feature (1)..( 12): Result.005 file - promoters50/4766578
atagtaattact

SEQ ID NO: 187778 - DNA, 12 bp, Unknown
  misc_feature (1)..( 12): Result.005 file - promoters50/4766578
gatgtaattaag

SEQ ID NO: 187779 - DNA, 7 bp, Unknown
  misc_feature (1)..( 7): Result.005 file - promoters50/4766578
taattaa

SEQ ID NO: 187780 - DNA, 7 bp, Unknown
  misc_feature (1)..( 7): Result.005 file - promoters50/4766578
taattaa

SEQ ID NO: 187781 - DNA, 7 bp, Unknown
  misc_feature (1)..( 7): Result.005 file - promoters50/4766578
taattac

SEQ ID NO: 187782 - DNA, 7 bp, Unknown
  misc_feature (1)..( 7): Result.005 file - promoters50/4766578
taattag

SEQ ID NO: 187783 - DNA, 10 bp, Unknown
  misc_feature (1)..( 10): Result.005 file - promoters50/4766578
aaacattaac

SEQ ID NO: 187784 - DNA, 10 bp, Unknown
  misc_feature (1)..( 10): Result.005 file - promoters50/4766578
aaaaattatt

SEQ ID NO: 187785 - DNA, 10 bp, Unknown
  misc_feature (1)..( 10): Result.005 file - promoters50/4766578
aaacaataaa

SEQ ID NO: 187786 - DNA, 10 bp, Unknown
  misc_feature (1)..( 10): Result.005 file - promoters50/4766578
gtaaaataaa

SEQ ID NO: 187787 - DNA, 7 bp, Unknown
  misc_feature (1)..( 7): Result.005 file - promoters50/4766578
aaaaaaa

SEQ ID NO: 187788 - DNA, 7 bp, Unknown
  misc_feature (1)..( 7): Result.005 file - promoters50/4766578
aaaaaaa

SEQ ID NO: 187789 - DNA, 7 bp, Unknown
  misc_feature (1)..( 7): Result.005 file - promoters50/4766578
aaaaaac

SEQ ID NO: 187790 - DNA, 7 bp, Unknown
  misc_feature (1)..( 7): Result.005 file - promoters50/4766578
ataaaaa

SEQ ID NO: 187791 - DNA, 16 bp, Unknown
  misc_feature (1)..( 16): Result.005 file - promoters50/4766578
ggttttttgattaatg

SEQ ID NO: 187792 - DNA, 16 bp, Unknown
  misc_feature (1)..( 16): Result.005 file - promoters50/4766578
attattttaattttgg

SEQ ID NO: 187793 - DNA, 17 bp, Unknown
  misc_feature (1)..( 17): Result.005 file - promoters50/4766578
atatttcttgaattatc

SEQ ID NO: 187794 - DNA, 17 bp, Unknown
  misc_feature (1)..( 17): Result.005 file - promoters50/4766578
acttgtttcaatattgg

SEQ ID NO: 187795 - DNA, 17 bp, Unknown
  misc_feature (1)..( 17): Result.005 file - promoters50/4766578
atattgcttgtgctaag

SEQ ID NO: 187796 - DNA, 8 bp, Unknown
  misc_feature (1)..( 8): Result.005 file - promoters50/4766585
ttttcatt

SEQ ID NO: 187797 - DNA, 8 bp, Unknown
  misc_feature (1)..( 8): Result.005 file - promoters50/4766585
gtttgatt

SEQ ID NO: 187798 - DNA, 8 bp, Unknown
  misc_feature (1)..( 8): Result.005 file - promoters50/4766585
ttttaatt

SEQ ID NO: 187799 - DNA, 11 bp, Unknown
  misc_feature (1)..( 11): Result.005 file - promoters50/4766585
gttcacgagtt

SEQ ID NO: 187800 - DNA, 11 bp, Unknown
  misc_feature (1)..( 11): Result.005 file - promoters50/4766585
gttgacgtttg

SEQ ID NO: 187801 - DNA, 11 bp, Unknown
  misc_feature (1)..( 11): Result.005 file - promoters50/4766585
attgatgtttg

SEQ ID NO: 187802 - DNA, 8 bp, Unknown
  misc_feature (1)..( 8): Result.005 file - promoters50/4766585
ttttttat

SEQ ID NO: 187803 - DNA, 8 bp, Unknown
  misc_feature (1)..( 8): Result.005 file - promoters50/4766585
ccttttat

SEQ ID NO: 187804 - DNA, 8 bp, Unknown
  misc_feature (1)..( 8): Result.005 file - promoters50/4766585
cctgttaa

SEQ ID NO: 187805 - DNA, 10 bp, Unknown
  misc_feature (1)..( 10): Result.005 file - promoters50/4766602
ctaatataaa

SEQ ID NO: 187806 - DNA, 10 bp, Unknown
  misc_feature (1)..( 10): Result.005 file - promoters50/4766602
actatataat

SEQ ID NO: 187807 - DNA, 10 bp, Unknown
  misc_feature (1)..( 10): Result.005 file - promoters50/4766602
actatataag

SEQ ID NO: 187808 - DNA, 10 bp, Unknown
  misc_feature (1)..( 10): Result.005 file - promoters50/4766602
actatataaa

SEQ ID NO: 187809 - DNA, 10 bp, Unknown
  misc_feature (1)..( 10): Result.005 file - promoters50/4766602
tctatataaa

SEQ ID NO: 187810 - DNA, 10 bp, Unknown
  misc_feature (1)..( 10): Result.005 file - promoters50/4766602
actatatata

SEQ ID NO: 187811 - DNA, 10 bp, Unknown
  misc_feature (1)..( 10): Result.005 file - promoters50/4766602
ccaatataat

SEQ ID NO: 187812 - DNA, 9 bp, Unknown
  misc_feature (1)..( 9): Result.005 file - promoters50/4766602
ctttttaac

SEQ ID NO: 187813 - DNA, 9 bp, Unknown
  misc_feature (1)..( 9): Result.005 file - promoters50/4766602
ttttttaat

SEQ ID NO: 187814 - DNA, 9 bp, Unknown
  misc_feature (1)..( 9): Result.005 file - promoters50/4766602
attttcaca

SEQ ID NO: 187815 - DNA, 9 bp, Unknown
  misc_feature (1)..( 9): Result.005 file - promoters50/4766602
gtttttttc

SEQ ID NO: 187816 - DNA, 9 bp, Unknown
  misc_feature (1)..( 9): Result.005 file - promoters50/4766602
gttttgatc

SEQ ID NO: 187817 - DNA, 9 bp, Unknown
  misc_feature (1)..( 9): Result.005 file - promoters50/4766602
gttttgatt

SEQ ID NO: 187818 - DNA, 11 bp, Unknown
  misc_feature (1)..( 11): Result.005 file - promoters50/4766602
attttcatttc

SEQ ID NO: 187819 - DNA, 11 bp, Unknown
  misc_feature (1)..( 11): Result.005 file - promoters50/4766602
gttttgatttt

SEQ ID NO: 187820 - DNA, 11 bp, Unknown
  misc_feature (1)..( 11): Result.005 file - promoters50/4766602
tttttcattgt

SEQ ID NO: 187821 - DNA, 11 bp, Unknown
  misc_feature (1)..( 11): Result.005 file - promoters50/4766602
attttcacaaa

SEQ ID NO: 187822 - DNA, 11 bp, Unknown
  misc_feature (1)..( 11): Result.005 file - promoters50/4766602
attttgatttt

SEQ ID NO: 187823 - DNA, 11 bp, Unknown
  misc_feature (1)..( 11): Result.005 file - promoters50/4766602
gttttgatcga

SEQ ID NO: 187824 - DNA, 7 bp, Unknown
  misc_feature (1)..( 7): Result.005 file - promoters50/4766654
tttatat

SEQ ID NO: 187825 - DNA, 7 bp, Unknown
  misc_feature (1)..( 7): Result.005 file - promoters50/4766654
tttgtat

SEQ ID NO: 187826 - DNA, 7 bp, Unknown
  misc_feature (1)..( 7): Result.005 file - promoters50/4766654
tttatat

SEQ ID NO: 187827 - DNA, 8 bp, Unknown
  misc_feature (1)..( 8): Result.005 file - promoters50/4766654
gtttataa

SEQ ID NO: 187828 - DNA, 8 bp, Unknown
  misc_feature (1)..( 8): Result.005 file - promoters50/4766654
ctttctaa

SEQ ID NO: 187829 - DNA, 8 bp, Unknown
  misc_feature (1)..( 8): Result.005 file - promoters50/4766654
gttgataa

SEQ ID NO: 187830 - DNA, 7 bp, Unknown
  misc_feature (1)..( 7): Result.005 file - promoters50/4766654
gataaac

SEQ ID NO: 187831 - DNA, 7 bp, Unknown
  misc_feature (1)..( 7): Result.005 file - promoters50/4766654
gataaaa

SEQ ID NO: 187832 - DNA, 8 bp, Unknown
  misc_feature (1)..( 8): Result.005 file - promoters50/4766654
aatagaaa

SEQ ID NO: 187833 - DNA, 8 bp, Unknown
  misc_feature (1)..( 8): Result.005 file - promoters50/4766654
aacactat

SEQ ID NO: 187834 - DNA, 8 bp, Unknown
  misc_feature (1)..( 8): Result.005 file - promoters50/4766654
aacacttt

SEQ ID NO: 187835 - DNA, 8 bp, Unknown
  misc_feature (1)..( 8): Result.005 file - promoters50/4766654
tacaattt

SEQ ID NO: 187836 - DNA, 8 bp, Unknown
  misc_feature (1)..( 8): Result.005 file - promoters50/4766678
gaaaaaaa

SEQ ID NO: 187837 - DNA, 8 bp, Unknown
  misc_feature (1)..( 8): Result.005 file - promoters50/4766678
aaaagaaa

SEQ ID NO: 187838 - DNA, 8 bp, Unknown
  misc_feature (1)..( 8): Result.005 file - promoters50/4766678
gaaaaagc

SEQ ID NO: 187839 - DNA, 8 bp, Unknown
  misc_feature (1)..( 8): Result.005 file - promoters50/4766678
gttaaaaa

SEQ ID NO: 187840 - DNA, 8 bp, Unknown
  misc_feature (1)..( 8): Result.005 file - promoters50/4766678
attacaaa

SEQ ID NO: 187841 - DNA, 8 bp, Unknown
  misc_feature (1)..( 8): Result.005 file - promoters50/4766678
gttaaagc

SEQ ID NO: 187842 - DNA, 8 bp, Unknown
  misc_feature (1)..( 8): Result.005 file - promoters50/4766678
attcattt

SEQ ID NO: 187843 - DNA, 8 bp, Unknown
  misc_feature (1)..( 8): Result.005 file - promoters50/4766678
tttcattt

SEQ ID NO: 187844 - DNA, 9 bp, Unknown
  misc_feature (1)..( 9): Result.005 file - promoters50/4766678
tttccatat

SEQ ID NO: 187845 - DNA, 8 bp, Unknown
  misc_feature (1)..( 8): Result.005 file - promoters50/4766678
aaaattca

SEQ ID NO: 187846 - DNA, 8 bp, Unknown
  misc_feature (1)..( 8): Result.005 file - promoters50/4766678
aaatttcc

SEQ ID NO: 187847 - DNA, 8 bp, Unknown
  misc_feature (1)..( 8): Result.005 file - promoters50/4766678
tcatttcc

SEQ ID NO: 187848 - DNA, 10 bp, Unknown
  misc_feature (1)..( 10): Result.005 file - promoters50/4766727
atatgaatca

SEQ ID NO: 187849 - DNA, 10 bp, Unknown
  misc_feature (1)..( 10): Result.005 file - promoters50/4766727
atataaatta

SEQ ID NO: 187850 - DNA, 10 bp, Unknown
  misc_feature (1)..( 10): Result.005 file - promoters50/4766727
acatacatta

SEQ ID NO: 187851 - DNA, 9 bp, Unknown
  misc_feature (1)..( 9): Result.005 file - promoters50/4766727
taatgatta

SEQ ID NO: 187852 - DNA, 9 bp, Unknown
  misc_feature (1)..( 9): Result.005 file - promoters50/4766727
aaataatta

SEQ ID NO: 187853 - DNA, 9 bp, Unknown
  misc_feature (1)..( 9): Result.005 file - promoters50/4766727
taatgataa

SEQ ID NO: 187854 - DNA, 10 bp, Unknown
  misc_feature (1)..( 10): Result.005 file - promoters50/4766738
aatactaaaa

SEQ ID NO: 187855 - DNA, 10 bp, Unknown
  misc_feature (1)..( 10): Result.005 file - promoters50/4766738
gatagtaaaa

SEQ ID NO: 187856 - DNA, 10 bp, Unknown
  misc_feature (1)..( 10): Result.005 file - promoters50/4766738
aatattaaga

SEQ ID NO: 187857 - DNA, 9 bp, Unknown
  misc_feature (1)..( 9): Result.005 file - promoters50/4766746
aaatataaa

SEQ ID NO: 187858 - DNA, 9 bp, Unknown
  misc_feature (1)..( 9): Result.005 file - promoters50/4766746
gtatataaa

SEQ ID NO: 187859 - DNA, 9 bp, Unknown
  misc_feature (1)..( 9): Result.005 file - promoters50/4766746
gtatatatt

SEQ ID NO: 187860 - DNA, 8 bp, Unknown
  misc_feature (1)..( 8): Result.005 file - promoters50/4766746
aaattgac

SEQ ID NO: 187861 - DNA, 8 bp, Unknown
  misc_feature (1)..( 8): Result.005 file - promoters50/4766746
aaattggg

SEQ ID NO: 187862 - DNA, 8 bp, Unknown
  misc_feature (1)..( 8): Result.005 file - promoters50/4766746
taatcggg

SEQ ID NO: 187863 - DNA, 8 bp, Unknown
  misc_feature (1)..( 8): Result.005 file - promoters50/4766750
atttctaa

SEQ ID NO: 187864 - DNA, 8 bp, Unknown
  misc_feature (1)..( 8): Result.005 file - promoters50/4766750
tcttctaa

SEQ ID NO: 187865 - DNA, 8 bp, Unknown
  misc_feature (1)..( 8): Result.005 file - promoters50/4766750
atttttaa

SEQ ID NO: 187866 - DNA, 8 bp, Unknown
  misc_feature (1)..( 8): Result.005 file - promoters50/4766754
agtataaa

SEQ ID NO: 187867 - DNA, 8 bp, Unknown
  misc_feature (1)..( 8): Result.005 file - promoters50/4766754
agtatata

SEQ ID NO: 187868 - DNA, 8 bp, Unknown
  misc_feature (1)..( 8): Result.005 file - promoters50/4766754
tgtatata

SEQ ID NO: 187869 - DNA, 8 bp, Unknown
  misc_feature (1)..( 8): Result.005 file - promoters50/4766776
tatgtatc

SEQ ID NO: 187870 - DNA, 8 bp, Unknown
  misc_feature (1)..( 8): Result.005 file - promoters50/4766776
tatttatt

SEQ ID NO: 187871 - DNA, 8 bp, Unknown
  misc_feature (1)..( 8): Result.005 file - promoters50/4766776
tatatatc

SEQ ID NO: 187872 - DNA, 8 bp, Unknown
  misc_feature (1)..( 8): Result.005 file - promoters50/4766776
aaaaatat

SEQ ID NO: 187873 - DNA, 8 bp, Unknown
  misc_feature (1)..( 8): Result.005 file - promoters50/4766776
aaaaatat

SEQ ID NO: 187874 - DNA, 8 bp, Unknown
  misc_feature (1)..( 8): Result.005 file - promoters50/4766776
ataaatat

SEQ ID NO: 187875 - DNA, 12 bp, Unknown
  misc_feature (1)..( 12): Result.005 file - promoters50/4766776
atcttaaaatat

SEQ ID NO: 187876 - DNA, 12 bp, Unknown
  misc_feature (1)..( 12): Result.005 file - promoters50/4766776
gtactaaaatat

SEQ ID NO: 187877 - DNA, 12 bp, Unknown
  misc_feature (1)..( 12): Result.005 file - promoters50/4766776
atcttaagatat

SEQ ID NO: 187878 - DNA, 8 bp, Unknown
  misc_feature (1)..( 8): Result.005 file - promoters50/4766776
aaattaat

SEQ ID NO: 187879 - DNA, 8 bp, Unknown
  misc_feature (1)..( 8): Result.005 file - promoters50/4766776
aaatcaat

SEQ ID NO: 187880 - DNA, 8 bp, Unknown
  misc_feature (1)..( 8): Result.005 file - promoters50/4766776
aaaacaac

SEQ ID NO: 187881 - DNA, 11 bp, Unknown
  misc_feature (1)..( 11): Result.005 file - promoters50/4766784
acaagtttttt

SEQ ID NO: 187882 - DNA, 11 bp, Unknown
  misc_feature (1)..( 11): Result.005 file - promoters50/4766784
aattgttgttt

SEQ ID NO: 187883 - DNA, 11 bp, Unknown
  misc_feature (1)..( 11): Result.005 file - promoters50/4766784
acaagatttga

SEQ ID NO: 187884 - DNA, 11 bp, Unknown
  misc_feature (1)..( 11): Result.005 file - promoters50/4766788
attggataatt

SEQ ID NO: 187885 - DNA, 11 bp, Unknown
  misc_feature (1)..( 11): Result.005 file - promoters50/4766788
aactgatgatt

SEQ ID NO: 187886 - DNA, 11 bp, Unknown
  misc_feature (1)..( 11): Result.005 file - promoters50/4766788
attgaataatg

SEQ ID NO: 187887 - DNA, 6 bp, Unknown
  misc_feature (1)..( 6): Result.005 file - promoters50/4766788
atttca

SEQ ID NO: 187888 - DNA, 6 bp, Unknown
  misc_feature (1)..( 6): Result.005 file - promoters50/4766788
atttca

SEQ ID NO: 187889 - DNA, 6 bp, Unknown
  misc_feature (1)..( 6): Result.005 file - promoters50/4766788
atttca

SEQ ID NO: 187890 - DNA, 7 bp, Unknown
  misc_feature (1)..( 7): Result.005 file - promoters50/4766792
cttcatt

SEQ ID NO: 187891 - DNA, 7 bp, Unknown
  misc_feature (1)..( 7): Result.005 file - promoters50/4766792
ctttatt

SEQ ID NO: 187892 - DNA, 7 bp, Unknown
  misc_feature (1)..( 7): Result.005 file - promoters50/4766792
atttatt

SEQ ID NO: 187893 - DNA, 9 bp, Unknown
  misc_feature (1)..( 9): Result.005 file - promoters50/4766792
aaaaaaaca

SEQ ID NO: 187894 - DNA, 9 bp, Unknown
  misc_feature (1)..( 9): Result.005 file - promoters50/4766792
aaataaaca

SEQ ID NO: 187895 - DNA, 9 bp, Unknown
  misc_feature (1)..( 9): Result.005 file - promoters50/4766792
aaataacta

SEQ ID NO: 187896 - DNA, 7 bp, Unknown
  misc_feature (1)..( 7): Result.005 file - promoters50/4766792
attattt

SEQ ID NO: 187897 - DNA, 7 bp, Unknown
  misc_feature (1)..( 7): Result.005 file - promoters50/4766792
tttattt

SEQ ID NO: 187898 - DNA, 7 bp, Unknown
  misc_feature (1)..( 7): Result.005 file - promoters50/4766792
tttatta

SEQ ID NO: 187899 - DNA, 7 bp, Unknown
  misc_feature (1)..( 7): Result.005 file - promoters50/4766812
aattttt

SEQ ID NO: 187900 - DNA, 7 bp, Unknown
  misc_feature (1)..( 7): Result.005 file - promoters50/4766812
tattttt

SEQ ID NO: 187901 - DNA, 7 bp, Unknown
  misc_feature (1)..( 7): Result.005 file - promoters50/4766812
aattttg

SEQ ID NO: 187902 - DNA, 9 bp, Unknown
  misc_feature (1)..( 9): Result.005 file - promoters50/4766812
aatataaat

SEQ ID NO: 187903 - DNA, 9 bp, Unknown
  misc_feature (1)..( 9): Result.005 file - promoters50/4766812
gataaaaaa

SEQ ID NO: 187904 - DNA, 9 bp, Unknown
  misc_feature (1)..( 9): Result.005 file - promoters50/4766812
aatagaaat

SEQ ID NO: 187905 - DNA, 9 bp, Unknown
  misc_feature (1)..( 9): Result.005 file - promoters50/4766812
agtaattat

SEQ ID NO: 187906 - DNA, 9 bp, Unknown
  misc_feature (1)..( 9): Result.005 file - promoters50/4766812
ggtatttat

SEQ ID NO: 187907 - DNA, 9 bp, Unknown
  misc_feature (1)..( 9): Result.005 file - promoters50/4766812
agttattaa

SEQ ID NO: 187908 - DNA, 7 bp, Unknown
  misc_feature (1)..( 7): Result.005 file - promoters50/4766812
aatcaag

SEQ ID NO: 187909 - DNA, 7 bp, Unknown
  misc_feature (1)..( 7): Result.005 file - promoters50/4766812
aatcaat

SEQ ID NO: 187910 - DNA, 7 bp, Unknown
  misc_feature (1)..( 7): Result.005 file - promoters50/4766812
aataaag

SEQ ID NO: 187911 - DNA, 8 bp, Unknown
  misc_feature (1)..( 8): Result.005 file - promoters50/4766812
agaaaacc

SEQ ID NO: 187912 - DNA, 8 bp, Unknown
  misc_feature (1)..( 8): Result.005 file - promoters50/4766812
tgaagacc

SEQ ID NO: 187913 - DNA, 8 bp, Unknown
  misc_feature (1)..( 8): Result.005 file - promoters50/4766812
agaaaatt

SEQ ID NO: 187914 - DNA, 9 bp, Unknown
  misc_feature (1)..( 9): Result.005 file - promoters50/4766816
taaatttgg

SEQ ID NO: 187915 - DNA, 9 bp, Unknown
  misc_feature (1)..( 9): Result.005 file - promoters50/4766816
caaatatgg

SEQ ID NO: 187916 - DNA, 9 bp, Unknown
  misc_feature (1)..( 9): Result.005 file - promoters50/4766816
caaatatgc

SEQ ID NO: 187917 - DNA, 8 bp, Unknown
  misc_feature (1)..( 8): Result.005 file - promoters50/4766823
atgttcct

SEQ ID NO: 187918 - DNA, 8 bp, Unknown
  misc_feature (1)..( 8): Result.005 file - promoters50/4766823
ttgttcca

SEQ ID NO: 187919 - DNA, 8 bp, Unknown
  misc_feature (1)..( 8): Result.005 file - promoters50/4766823
ttgtgcca

SEQ ID NO: 187920 - DNA, 9 bp, Unknown
  misc_feature (1)..( 9): Result.005 file - promoters50/4766835
agataaaat

SEQ ID NO: 187921 - DNA, 9 bp, Unknown
  misc_feature (1)..( 9): Result.005 file - promoters50/4766835
agaaaaaac

SEQ ID NO: 187922 - DNA, 9 bp, Unknown
  misc_feature (1)..( 9): Result.005 file - promoters50/4766835
ccttaaaat

SEQ ID NO: 187923 - DNA, 8 bp, Unknown
  misc_feature (1)..( 8): Result.005 file - promoters50/4766835
ctaaattt

SEQ ID NO: 187924 - DNA, 8 bp, Unknown
  misc_feature (1)..( 8): Result.005 file - promoters50/4766835
ttaatttt

SEQ ID NO: 187925 - DNA, 8 bp, Unknown
  misc_feature (1)..( 8): Result.005 file - promoters50/4766835
ttaattca

SEQ ID NO: 187926 - DNA, 9 bp, Unknown
  misc_feature (1)..( 9): Result.005 file - promoters50/4766835
tgctaaaaa

SEQ ID NO: 187927 - DNA, 9 bp, Unknown
  misc_feature (1)..( 9): Result.005 file - promoters50/4766835
tcataaaaa

SEQ ID NO: 187928 - DNA, 9 bp, Unknown
  misc_feature (1)..( 9): Result.005 file - promoters50/4766835
cattaaatg

SEQ ID NO: 187929 - DNA, 8 bp, Unknown
  misc_feature (1)..( 8): Result.005 file - promoters50/4766835
aagttcaa

SEQ ID NO: 187930 - DNA, 8 bp, Unknown
  misc_feature (1)..( 8): Result.005 file - promoters50/4766835
aaggtcag

SEQ ID NO: 187931 - DNA, 8 bp, Unknown
  misc_feature (1)..( 8): Result.005 file - promoters50/4766835
cggttcaa

SEQ ID NO: 187932 - DNA, 7 bp, Unknown
  misc_feature (1)..( 7): Result.005 file - promoters50/4766835
atcaaaa

SEQ ID NO: 187933 - DNA, 7 bp, Unknown
  misc_feature (1)..( 7): Result.005 file - promoters50/4766835
atccaaa

SEQ ID NO: 187934 - DNA, 7 bp, Unknown
  misc_feature (1)..( 7): Result.005 file - promoters50/4766835
atctaaa

SEQ ID NO: 187935 - DNA, 8 bp, Unknown
  misc_feature (1)..( 8): Result.005 file - promoters50/4766835
aaacaact

SEQ ID NO: 187936 - DNA, 8 bp, Unknown
  misc_feature (1)..( 8): Result.005 file - promoters50/4766835
aaacaaaa

SEQ ID NO: 187937 - DNA, 8 bp, Unknown
  misc_feature (1)..( 8): Result.005 file - promoters50/4766835
aaagaaaa

SEQ ID NO: 187938 - DNA, 10 bp, Unknown
  misc_feature (1)..( 10): Result.005 file - promoters50/4766835
aaaaaatgtt

SEQ ID NO: 187939 - DNA, 10 bp, Unknown
  misc_feature (1)..( 10): Result.005 file - promoters50/4766835
aaataattga

SEQ ID NO: 187940 - DNA, 10 bp, Unknown
  misc_feature (1)..( 10): Result.005 file - promoters50/4766835
aaataaatga

SEQ ID NO: 187941 - DNA, 8 bp, Unknown
  misc_feature (1)..( 8): Result.005 file - promoters50/4766835
acacattt

SEQ ID NO: 187942 - DNA, 8 bp, Unknown
  misc_feature (1)..( 8): Result.005 file - promoters50/4766835
acacataa

SEQ ID NO: 187943 - DNA, 8 bp, Unknown
  misc_feature (1)..( 8): Result.005 file - promoters50/4766835
acaaataa

SEQ ID NO: 187944 - DNA, 7 bp, Unknown
  misc_feature (1)..( 7): Result.005 file - promoters50/4766835
ttttcat

SEQ ID NO: 187945 - DNA, 7 bp, Unknown
  misc_feature (1)..( 7): Result.005 file - promoters50/4766835
ttttcag

SEQ ID NO: 187946 - DNA, 7 bp, Unknown
  misc_feature (1)..( 7): Result.005 file - promoters50/4766835
ttttcag

SEQ ID NO: 187947 - DNA, 8 bp, Unknown
  misc_feature (1)..( 8): Result.005 file - promoters50/4766858
aagaactt

SEQ ID NO: 187948 - DNA, 8 bp, Unknown
  misc_feature (1)..( 8): Result.005 file - promoters50/4766858
cagatctt

SEQ ID NO: 187949 - DNA, 8 bp, Unknown
  misc_feature (1)..( 8): Result.005 file - promoters50/4766858
atcatctt

SEQ ID NO: 187950 - DNA, 10 bp, Unknown
  misc_feature (1)..( 10): Result.005 file - promoters50/4766862
gtgagaaatt

SEQ ID NO: 187951 - DNA, 10 bp, Unknown
  misc_feature (1)..( 10): Result.005 file - promoters50/4766862
gattgaaatt

SEQ ID NO: 187952 - DNA, 10 bp, Unknown
  misc_feature (1)..( 10): Result.005 file - promoters50/4766862
gagtgaaatt

SEQ ID NO: 187953 - DNA, 10 bp, Unknown
  misc_feature (1)..( 10): Result.005 file - promoters50/4766862
tttcgaaatt

SEQ ID NO: 187954 - DNA, 10 bp, Unknown
  misc_feature (1)..( 10): Result.005 file - promoters50/4766862
ctgaaaaatt

SEQ ID NO: 187955 - DNA, 10 bp, Unknown
  misc_feature (1)..( 10): Result.005 file - promoters50/4766862
acgtggaata

SEQ ID NO: 187956 - DNA, 10 bp, Unknown
  misc_feature (1)..( 10): Result.005 file - promoters50/4766862
atctcaaaat

SEQ ID NO: 187957 - DNA, 13 bp, Unknown
  misc_feature (1)..( 13): Result.005 file - promoters50/4766862
ttgttaaagagct

SEQ ID NO: 187958 - DNA, 13 bp, Unknown
  misc_feature (1)..( 13): Result.005 file - promoters50/4766862
agcttagagacaa

SEQ ID NO: 187959 - DNA, 13 bp, Unknown
  misc_feature (1)..( 13): Result.005 file - promoters50/4766862
ttgttgaagaagt

SEQ ID NO: 187960 - DNA, 13 bp, Unknown
  misc_feature (1)..( 13): Result.005 file - promoters50/4766862
ggattgatgacgt

SEQ ID NO: 187961 - DNA, 13 bp, Unknown
  misc_feature (1)..( 13): Result.005 file - promoters50/4766862
atgcagaagaaga

SEQ ID NO: 187962 - DNA, 13 bp, Unknown
  misc_feature (1)..( 13): Result.005 file - promoters50/4766862
tttgggaaaaagt

SEQ ID NO: 187963 - DNA, 13 bp, Unknown
  misc_feature (1)..( 13): Result.005 file - promoters50/4766866
aaaagaaattaac

SEQ ID NO: 187964 - DNA, 13 bp, Unknown
  misc_feature (1)..( 13): Result.005 file - promoters50/4766866
aaaagaaaataaa

SEQ ID NO: 187965 - DNA, 13 bp, Unknown
  misc_feature (1)..( 13): Result.005 file - promoters50/4766866
aaatgaaatatct

SEQ ID NO: 187966 - DNA, 13 bp, Unknown
  misc_feature (1)..( 13): Result.005 file - promoters50/4766866
gttggaatttaga

SEQ ID NO: 187967 - DNA, 13 bp, Unknown
  misc_feature (1)..( 13): Result.005 file - promoters50/4766866
caagacatttaga

SEQ ID NO: 187968 - DNA, 12 bp, Unknown
  misc_feature (1)..( 12): Result.005 file - promoters50/4766866
ttgagacaaaaa

SEQ ID NO: 187969 - DNA, 12 bp, Unknown
  misc_feature (1)..( 12): Result.005 file - promoters50/4766866
ttgaaacaaaaa

SEQ ID NO: 187970 - DNA, 12 bp, Unknown
  misc_feature (1)..( 12): Result.005 file - promoters50/4766866
ataagacaacac

SEQ ID NO: 187971 - DNA, 12 bp, Unknown
  misc_feature (1)..( 12): Result.005 file - promoters50/4766866
gagaaagaaagc

SEQ ID NO: 187972 - DNA, 12 bp, Unknown
  misc_feature (1)..( 12): Result.005 file - promoters50/4766866
taaagacacacc

SEQ ID NO: 187973 - DNA, 9 bp, Unknown
  misc_feature (1)..( 9): Result.005 file - promoters50/4766866
aaaaataat

SEQ ID NO: 187974 - DNA, 9 bp, Unknown
  misc_feature (1)..( 9): Result.005 file - promoters50/4766866
taaattaaa

SEQ ID NO: 187975 - DNA, 9 bp, Unknown
  misc_feature (1)..( 9): Result.005 file - promoters50/4766866
gaaaatagt

SEQ ID NO: 187976 - DNA, 9 bp, Unknown
  misc_feature (1)..( 9): Result.005 file - promoters50/4766866
gaaaatgct

SEQ ID NO: 187977 - DNA, 9 bp, Unknown
  misc_feature (1)..( 9): Result.005 file - promoters50/4766866
taaattggg

SEQ ID NO: 187978 - DNA, 9 bp, Unknown
  misc_feature (1)..( 9): Result.005 file - promoters50/4766866
attattaaa

SEQ ID NO: 187979 - DNA, 7 bp, Unknown
  misc_feature (1)..( 7): Result.005 file - promoters50/4766870
gattttt

SEQ ID NO: 187980 - DNA, 7 bp, Unknown
  misc_feature (1)..( 7): Result.005 file - promoters50/4766870
gattttg

SEQ ID NO: 187981 - DNA, 7 bp, Unknown
  misc_feature (1)..( 7): Result.005 file - promoters50/4766870
gatgttg

SEQ ID NO: 187982 - DNA, 7 bp, Unknown
  misc_feature (1)..( 7): Result.005 file - promoters50/4766870
tctaaaa

SEQ ID NO: 187983 - DNA, 7 bp, Unknown
  misc_feature (1)..( 7): Result.005 file - promoters50/4766870
tcttaaa

SEQ ID NO: 187984 - DNA, 7 bp, Unknown
  misc_feature (1)..( 7): Result.005 file - promoters50/4766870
gcttaaa

SEQ ID NO: 187985 - DNA, 9 bp, Unknown
  misc_feature (1)..( 9): Result.005 file - promoters50/4766908
ttgctttaa

SEQ ID NO: 187986 - DNA, 9 bp, Unknown
  misc_feature (1)..( 9): Result.005 file - promoters50/4766908
atgctttgt

SEQ ID NO: 187987 - DNA, 9 bp, Unknown
  misc_feature (1)..( 9): Result.005 file - promoters50/4766908
ttgttttaa

SEQ ID NO: 187988 - DNA, 9 bp, Unknown
  misc_feature (1)..( 9): Result.005 file - promoters50/4766908
aaataaaaa

SEQ ID NO: 187989 - DNA, 9 bp, Unknown
  misc_feature (1)..( 9): Result.005 file - promoters50/4766908
aaagaaagc

SEQ ID NO: 187990 - DNA, 9 bp, Unknown
  misc_feature (1)..( 9): Result.005 file - promoters50/4766908
aaacaaaaa

SEQ ID NO: 187991 - DNA, 10 bp, Unknown
  misc_feature (1)..( 10): Result.005 file - promoters50/4766908
acccattaaa

SEQ ID NO: 187992 - DNA, 10 bp, Unknown
  misc_feature (1)..( 10): Result.005 file - promoters50/4766908
acccactaaa

SEQ ID NO: 187993 - DNA, 10 bp, Unknown
  misc_feature (1)..( 10): Result.005 file - promoters50/4766908
tcccactaga

SEQ ID NO: 187994 - DNA, 9 bp, Unknown
  misc_feature (1)..( 9): Result.005 file - promoters50/4766912
ggttaataa

SEQ ID NO: 187995 - DNA, 9 bp, Unknown
  misc_feature (1)..( 9): Result.005 file - promoters50/4766912
gcttattaa

SEQ ID NO: 187996 - DNA, 9 bp, Unknown
  misc_feature (1)..( 9): Result.005 file - promoters50/4766912
gctgattcc

SEQ ID NO: 187997 - DNA, 7 bp, Unknown
  misc_feature (1)..( 7): Result.005 file - promoters50/4766912
agtattc

SEQ ID NO: 187998 - DNA, 7 bp, Unknown
  misc_feature (1)..( 7): Result.005 file - promoters50/4766912
tgtattc

SEQ ID NO: 187999 - DNA, 7 bp, Unknown
  misc_feature (1)..( 7): Result.005 file - promoters50/4766912
agtattc

SEQ ID NO: 188000 - DNA, 9 bp, Unknown
  misc_feature (1)..( 9): Result.005 file - promoters50/4766912
gtttgtgtt

SEQ ID NO: 188001 - DNA, 9 bp, Unknown
  misc_feature (1)..( 9): Result.005 file - promoters50/4766912
gtttttgtt

SEQ ID NO: 188002 - DNA, 9 bp, Unknown
  misc_feature (1)..( 9): Result.005 file - promoters50/4766912
gtttgttaa

SEQ ID NO: 188003 - DNA, 7 bp, Unknown
  misc_feature (1)..( 7): Result.005 file - promoters50/4766912
tttgtga

SEQ ID NO: 188004 - DNA, 7 bp, Unknown
  misc_feature (1)..( 7): Result.005 file - promoters50/4766912
gttgtga

SEQ ID NO: 188005 - DNA, 7 bp, Unknown
  misc_feature (1)..( 7): Result.005 file - promoters50/4766912
gttctga

SEQ ID NO: 188006 - DNA, 7 bp, Unknown
  misc_feature (1)..( 7): Result.005 file - promoters50/4766912
tcttgtt

SEQ ID NO: 188007 - DNA, 7 bp, Unknown
  misc_feature (1)..( 7): Result.005 file - promoters50/4766912
tcttgtc

SEQ ID NO: 188008 - DNA, 7 bp, Unknown
  misc_feature (1)..( 7): Result.005 file - promoters50/4766912
acttgtc

SEQ ID NO: 188009 - DNA, 9 bp, Unknown
  misc_feature (1)..( 9): Result.005 file - promoters50/4766912
aagagatct

SEQ ID NO: 188010 - DNA, 9 bp, Unknown
  misc_feature (1)..( 9): Result.005 file - promoters50/4766912
cagagatcc

SEQ ID NO: 188011 - DNA, 9 bp, Unknown
  misc_feature (1)..( 9): Result.005 file - promoters50/4766912
cagaggtcc

SEQ ID NO: 188012 - DNA, 11 bp, Unknown
  misc_feature (1)..( 11): Result.005 file - promoters50/4766916
ttaccaaatat

SEQ ID NO: 188013 - DNA, 11 bp, Unknown
  misc_feature (1)..( 11): Result.005 file - promoters50/4766916
ttacaaaatta

SEQ ID NO: 188014 - DNA, 11 bp, Unknown
  misc_feature (1)..( 11): Result.005 file - promoters50/4766916
tttaaaaatta

SEQ ID NO: 188015 - DNA, 7 bp, Unknown
  misc_feature (1)..( 7): Result.005 file - promoters50/4766916
aatttta

SEQ ID NO: 188016 - DNA, 7 bp, Unknown
  misc_feature (1)..( 7): Result.005 file - promoters50/4766916
tatttta

SEQ ID NO: 188017 - DNA, 7 bp, Unknown
  misc_feature (1)..( 7): Result.005 file - promoters50/4766916
aattttt

SEQ ID NO: 188018 - DNA, 6 bp, Unknown
  misc_feature (1)..( 6): Result.005 file - promoters50/4766916
taaaaa

SEQ ID NO: 188019 - DNA, 6 bp, Unknown
  misc_feature (1)..( 6): Result.005 file - promoters50/4766916
taaaaa

SEQ ID NO: 188020 - DNA, 6 bp, Unknown
  misc_feature (1)..( 6): Result.005 file - promoters50/4766916
taaaaa

SEQ ID NO: 188021 - DNA, 9 bp, Unknown
  misc_feature (1)..( 9): Result.005 file - promoters50/4766916
aaaacatgt

SEQ ID NO: 188022 - DNA, 9 bp, Unknown
  misc_feature (1)..( 9): Result.005 file - promoters50/4766916
gaaaaatgt

SEQ ID NO: 188023 - DNA, 9 bp, Unknown
  misc_feature (1)..( 9): Result.005 file - promoters50/4766916
aaaacaaaa

SEQ ID NO: 188024 - DNA, 12 bp, Unknown
  misc_feature (1)..( 12): Result.005 file - promoters50/4766936
ttctttataagc

SEQ ID NO: 188025 - DNA, 12 bp, Unknown
  misc_feature (1)..( 12): Result.005 file - promoters50/4766936
atctttgtaaag

SEQ ID NO: 188026 - DNA, 12 bp, Unknown
  misc_feature (1)..( 12): Result.005 file - promoters50/4766936
atctatataaat

SEQ ID NO: 188027 - DNA, 12 bp, Unknown
  misc_feature (1)..( 12): Result.005 file - promoters50/4766936
tcaattaaaagt

SEQ ID NO: 188028 - DNA, 12 bp, Unknown
  misc_feature (1)..( 12): Result.005 file - promoters50/4766936
atcttttaaaaa

SEQ ID NO: 188029 - DNA, 12 bp, Unknown
  misc_feature (1)..( 12): Result.005 file - promoters50/4766936
ataagtataaat

SEQ ID NO: 188030 - DNA, 14 bp, Unknown
  misc_feature (1)..( 14): Result.005 file - promoters50/4766957
ctgtttttcattct

SEQ ID NO: 188031 - DNA, 14 bp, Unknown
  misc_feature (1)..( 14): Result.005 file - promoters50/4766957
acgtttgtcaatct

SEQ ID NO: 188032 - DNA, 14 bp, Unknown
  misc_feature (1)..( 14): Result.005 file - promoters50/4766957
tacttttttttttt

SEQ ID NO: 188033 - DNA, 12 bp, Unknown
  misc_feature (1)..( 12): Result.005 file - promoters50/4766957
agcgacaaaaaa

SEQ ID NO: 188034 - DNA, 12 bp, Unknown
  misc_feature (1)..( 12): Result.005 file - promoters50/4766957
ttaaataaaaaa

SEQ ID NO: 188035 - DNA, 12 bp, Unknown
  misc_feature (1)..( 12): Result.005 file - promoters50/4766957
ttaagtaaaaac

SEQ ID NO: 188036 - DNA, 13 bp, Unknown
  misc_feature (1)..( 13): Result.005 file - promoters50/4766957
gacaaaaaaaact

SEQ ID NO: 188037 - DNA, 13 bp, Unknown
  misc_feature (1)..( 13): Result.005 file - promoters50/4766957
ttaagtaaaaact

SEQ ID NO: 188038 - DNA, 13 bp, Unknown
  misc_feature (1)..( 13): Result.005 file - promoters50/4766957
ttaaataaaaaac

SEQ ID NO: 188039 - DNA, 12 bp, Unknown
  misc_feature (1)..( 12): Result.005 file - promoters50/4766977
aaaaataattga

SEQ ID NO: 188040 - DNA, 12 bp, Unknown
  misc_feature (1)..( 12): Result.005 file - promoters50/4766977
acaaagaatttc

SEQ ID NO: 188041 - DNA, 13 bp, Unknown
  misc_feature (1)..( 13): Result.005 file - promoters50/4766977
taaaattaagaat

SEQ ID NO: 188042 - DNA, 13 bp, Unknown
  misc_feature (1)..( 13): Result.005 file - promoters50/4766977
taaagttataaac

SEQ ID NO: 188043 - DNA, 13 bp, Unknown
  misc_feature (1)..( 13): Result.005 file - promoters50/4766977
tctcattaatgtt

SEQ ID NO: 188044 - DNA, 13 bp, Unknown
  misc_feature (1)..( 13): Result.005 file - promoters50/4766977
aatctttaaaatg

SEQ ID NO: 188045 - DNA, 13 bp, Unknown
  misc_feature (1)..( 13): Result.005 file - promoters50/4766977
atatataaatagt

SEQ ID NO: 188046 - DNA, 13 bp, Unknown
  misc_feature (1)..( 13): Result.005 file - promoters50/4766977
ctataaaaaaaaa

SEQ ID NO: 188047 - DNA, 13 bp, Unknown
  misc_feature (1)..( 13): Result.005 file - promoters50/4766977
ctataaatagaaa

SEQ ID NO: 188048 - DNA, 13 bp, Unknown
  misc_feature (1)..( 13): Result.005 file - promoters50/4766977
atataaataacac

SEQ ID NO: 188049 - DNA, 13 bp, Unknown
  misc_feature (1)..( 13): Result.005 file - promoters50/4766977
atataaatactct

SEQ ID NO: 188050 - DNA, 13 bp, Unknown
  misc_feature (1)..( 13): Result.005 file - promoters50/4766977
aaatatatgtggc

SEQ ID NO: 188051 - DNA, 13 bp, Unknown
  misc_feature (1)..( 13): Result.005 file - promoters50/4766977
atataaataaata

SEQ ID NO: 188052 - DNA, 16 bp, Unknown
  misc_feature (1)..( 16): Result.005 file - promoters50/4766977
taccagtatacggatc

SEQ ID NO: 188053 - DNA, 16 bp, Unknown
  misc_feature (1)..( 16): Result.005 file - promoters50/4766977
taatagtataaaatac

SEQ ID NO: 188054 - DNA, 16 bp, Unknown
  misc_feature (1)..( 16): Result.005 file - promoters50/4766977
aaagagtttaattctc

SEQ ID NO: 188055 - DNA, 16 bp, Unknown
  misc_feature (1)..( 16): Result.005 file - promoters50/4766977
cataagtagaaaactt

SEQ ID NO: 188056 - DNA, 16 bp, Unknown
  misc_feature (1)..( 16): Result.005 file - promoters50/4766977
aagacgcagaaaaaat

SEQ ID NO: 188057 - DNA, 16 bp, Unknown
  misc_feature (1)..( 16): Result.005 file - promoters50/4766977
tttcattttcaatttt

SEQ ID NO: 188058 - DNA, 16 bp, Unknown
  misc_feature (1)..( 16): Result.005 file - promoters50/4766977
ctgaaatttcaaattt

SEQ ID NO: 188059 - DNA, 13 bp, Unknown
  misc_feature (1)..( 13): Result.005 file - promoters50/4766977
tacattttgtaac

SEQ ID NO: 188060 - DNA, 13 bp, Unknown
  misc_feature (1)..( 13): Result.005 file - promoters50/4766977
aaaatttcgtaat

SEQ ID NO: 188061 - DNA, 13 bp, Unknown
  misc_feature (1)..( 13): Result.005 file - promoters50/4766977
acaatttacgtat

SEQ ID NO: 188062 - DNA, 13 bp, Unknown
  misc_feature (1)..( 13): Result.005 file - promoters50/4766977
tttctttttaatg

SEQ ID NO: 188063 - DNA, 13 bp, Unknown
  misc_feature (1)..( 13): Result.005 file - promoters50/4766977
aaatatttgtaat

SEQ ID NO: 188064 - DNA, 13 bp, Unknown
  misc_feature (1)..( 13): Result.005 file - promoters50/4766977
taaacttttaaat

SEQ ID NO: 188065 - DNA, 10 bp, Unknown
  misc_feature (1)..( 10): Result.005 file - promoters50/4766977
ttgctatact

SEQ ID NO: 188066 - DNA, 10 bp, Unknown
  misc_feature (1)..( 10): Result.005 file - promoters50/4766977
gacctaaact

SEQ ID NO: 188067 - DNA, 10 bp, Unknown
  misc_feature (1)..( 10): Result.005 file - promoters50/4766977
aaactaaaaa

SEQ ID NO: 188068 - DNA, 10 bp, Unknown
  misc_feature (1)..( 10): Result.005 file - promoters50/4766977
gaaccaaaat

SEQ ID NO: 188069 - DNA, 10 bp, Unknown
  misc_feature (1)..( 10): Result.005 file - promoters50/4766977
aaaataaaaa

SEQ ID NO: 188070 - DNA, 10 bp, Unknown
  misc_feature (1)..( 10): Result.005 file - promoters50/4766977
acattaaact

SEQ ID NO: 188071 - DNA, 14 bp, Unknown
  misc_feature (1)..( 14): Result.005 file - promoters50/4766977
ggacaataatagta

SEQ ID NO: 188072 - DNA, 14 bp, Unknown
  misc_feature (1)..( 14): Result.005 file - promoters50/4766977
gaacattaatatga

SEQ ID NO: 188073 - DNA, 14 bp, Unknown
  misc_feature (1)..( 14): Result.005 file - promoters50/4766977
actttttaatattt

SEQ ID NO: 188074 - DNA, 14 bp, Unknown
  misc_feature (1)..( 14): Result.005 file - promoters50/4766977
acttgttattattt

SEQ ID NO: 188075 - DNA, 14 bp, Unknown
  misc_feature (1)..( 14): Result.005 file - promoters50/4766977
ttaggttattttgg

SEQ ID NO: 188076 - DNA, 14 bp, Unknown
  misc_feature (1)..( 14): Result.005 file - promoters50/4766977
gtaagatatttttt

SEQ ID NO: 188077 - DNA, 11 bp, Unknown
  misc_feature (1)..( 11): Result.005 file - promoters50/4766977
taaaatacttt

SEQ ID NO: 188078 - DNA, 11 bp, Unknown
  misc_feature (1)..( 11): Result.005 file - promoters50/4766977
aaaaatatatt

SEQ ID NO: 188079 - DNA, 11 bp, Unknown
  misc_feature (1)..( 11): Result.005 file - promoters50/4766977
ttaaatacttt

SEQ ID NO: 188080 - DNA, 11 bp, Unknown
  misc_feature (1)..( 11): Result.005 file - promoters50/4766977
taagatatttt

SEQ ID NO: 188081 - DNA, 11 bp, Unknown
  misc_feature (1)..( 11): Result.005 file - promoters50/4766977
agaaatatatg

SEQ ID NO: 188082 - DNA, 11 bp, Unknown
  misc_feature (1)..( 11): Result.005 file - promoters50/4766977
aatcatatatg

SEQ ID NO: 188083 - DNA, 11 bp, Unknown
  misc_feature (1)..( 11): Result.005 file - promoters50/4766977
cacaataattt

SEQ ID NO: 188084 - DNA, 12 bp, Unknown
  misc_feature (1)..( 12): Result.005 file - promoters50/4766977
ttctttttcgag

SEQ ID NO: 188085 - DNA, 12 bp, Unknown
  misc_feature (1)..( 12): Result.005 file - promoters50/4766977
tactttatcgtc

SEQ ID NO: 188086 - DNA, 12 bp, Unknown
  misc_feature (1)..( 12): Result.005 file - promoters50/4766977
gtattttttttt

SEQ ID NO: 188087 - DNA, 12 bp, Unknown
  misc_feature (1)..( 12): Result.005 file - promoters50/4766977
acgtttataaga

SEQ ID NO: 188088 - DNA, 12 bp, Unknown
  misc_feature (1)..( 12): Result.005 file - promoters50/4766977
ttcattttcaat

SEQ ID NO: 188089 - DNA, 12 bp, Unknown
  misc_feature (1)..( 12): Result.005 file - promoters50/4766977
aaactttgcaat

SEQ ID NO: 188090 - DNA, 14 bp, Unknown
  misc_feature (1)..( 14): Result.005 file - promoters50/4766977
tccaatcaatcttt

SEQ ID NO: 188091 - DNA, 14 bp, Unknown
  misc_feature (1)..( 14): Result.005 file - promoters50/4766977
actttttaatattt

SEQ ID NO: 188092 - DNA, 14 bp, Unknown
  misc_feature (1)..( 14): Result.005 file - promoters50/4766977
gaacattaatatga

SEQ ID NO: 188093 - DNA, 14 bp, Unknown
  misc_feature (1)..( 14): Result.005 file - promoters50/4766977
acttgttattattt

SEQ ID NO: 188094 - DNA, 14 bp, Unknown
  misc_feature (1)..( 14): Result.005 file - promoters50/4766977
caagtaagatattt

SEQ ID NO: 188095 - DNA, 14 bp, Unknown
  misc_feature (1)..( 14): Result.005 file - promoters50/4766977
aatttaggttattt

SEQ ID NO: 188096 - DNA, 13 bp, Unknown
  misc_feature (1)..( 13): Result.005 file - promoters50/4766977
taaaatactttat

SEQ ID NO: 188097 - DNA, 13 bp, Unknown
  misc_feature (1)..( 13): Result.005 file - promoters50/4766977
cacaataatttag

SEQ ID NO: 188098 - DNA, 13 bp, Unknown
  misc_feature (1)..( 13): Result.005 file - promoters50/4766977
acgaatactatat

SEQ ID NO: 188099 - DNA, 13 bp, Unknown
  misc_feature (1)..( 13): Result.005 file - promoters50/4766977
taagatatttttt

SEQ ID NO: 188100 - DNA, 13 bp, Unknown
  misc_feature (1)..( 13): Result.005 file - promoters50/4766977
aaatatatttatt

SEQ ID NO: 188101 - DNA, 13 bp, Unknown
  misc_feature (1)..( 13): Result.005 file - promoters50/4766977
ttggatgttttcc

SEQ ID NO: 188102 - DNA, 13 bp, Unknown
  misc_feature (1)..( 13): Result.005 file - promoters50/4766977
ttaaatacttttt

SEQ ID NO: 188103 - DNA, 16 bp, Unknown
  misc_feature (1)..( 16): Result.005 file - promoters50/4766977
ctaaaaatatatttat

SEQ ID NO: 188104 - DNA, 16 bp, Unknown
  misc_feature (1)..( 16): Result.005 file - promoters50/4766977
acttgttattatttac

SEQ ID NO: 188105 - DNA, 16 bp, Unknown
  misc_feature (1)..( 16): Result.005 file - promoters50/4766977
caagtaagatattttt

SEQ ID NO: 188106 - DNA, 16 bp, Unknown
  misc_feature (1)..( 16): Result.005 file - promoters50/4766977
gaatttggatgttttc

SEQ ID NO: 188107 - DNA, 16 bp, Unknown
  misc_feature (1)..( 16): Result.005 file - promoters50/4766977
actttttaatatttca

SEQ ID NO: 188108 - DNA, 16 bp, Unknown
  misc_feature (1)..( 16): Result.005 file - promoters50/4766977
aatttaggttattttg

SEQ ID NO: 188109 - DNA, 10 bp, Unknown
  misc_feature (1)..( 10): Result.005 file - promoters50/4766980
catatactgt

SEQ ID NO: 188110 - DNA, 10 bp, Unknown
  misc_feature (1)..( 10): Result.005 file - promoters50/4766980
aatagactgt

SEQ ID NO: 188111 - DNA, 10 bp, Unknown
  misc_feature (1)..( 10): Result.005 file - promoters50/4766980
aatagatctt

SEQ ID NO: 188112 - DNA, 8 bp, Unknown
  misc_feature (1)..( 8): Result.005 file - promoters50/4766980
ggaagaaa

SEQ ID NO: 188113 - DNA, 8 bp, Unknown
  misc_feature (1)..( 8): Result.005 file - promoters50/4766980
aaaagaaa

SEQ ID NO: 188114 - DNA, 8 bp, Unknown
  misc_feature (1)..( 8): Result.005 file - promoters50/4766980
ggaagaaa

SEQ ID NO: 188115 - DNA, 8 bp, Unknown
  misc_feature (1)..( 8): Result.005 file - promoters50/4766983
tcttttat

SEQ ID NO: 188116 - DNA, 8 bp, Unknown
  misc_feature (1)..( 8): Result.005 file - promoters50/4766983
gcttctat

SEQ ID NO: 188117 - DNA, 8 bp, Unknown
  misc_feature (1)..( 8): Result.005 file - promoters50/4766983
aattctat

SEQ ID NO: 188118 - DNA, 8 bp, Unknown
  misc_feature (1)..( 8): Result.005 file - promoters50/4766983
aatactag

SEQ ID NO: 188119 - DNA, 11 bp, Unknown
  misc_feature (1)..( 11): Result.005 file - promoters50/4766983
attagactctt

SEQ ID NO: 188120 - DNA, 11 bp, Unknown
  misc_feature (1)..( 11): Result.005 file - promoters50/4766983
attaaactcat

SEQ ID NO: 188121 - DNA, 11 bp, Unknown
  misc_feature (1)..( 11): Result.005 file - promoters50/4766983
gtgatactaat

SEQ ID NO: 188122 - DNA, 11 bp, Unknown
  misc_feature (1)..( 11): Result.005 file - promoters50/4766983
tagttacaaat

SEQ ID NO: 188123 - DNA, 12 bp, Unknown
  misc_feature (1)..( 12): Result.005 file - promoters50/4766983
aaattgattaaa

SEQ ID NO: 188124 - DNA, 12 bp, Unknown
  misc_feature (1)..( 12): Result.005 file - promoters50/4766983
aaattgaataaa

SEQ ID NO: 188125 - DNA, 12 bp, Unknown
  misc_feature (1)..( 12): Result.005 file - promoters50/4766983
catttggttaca

SEQ ID NO: 188126 - DNA, 7 bp, Unknown
  misc_feature (1)..( 7): Result.005 file - promoters50/4766983
aaaaata

SEQ ID NO: 188127 - DNA, 7 bp, Unknown
  misc_feature (1)..( 7): Result.005 file - promoters50/4766983
aaaaatc

SEQ ID NO: 188128 - DNA, 7 bp, Unknown
  misc_feature (1)..( 7): Result.005 file - promoters50/4766983
aaatata

SEQ ID NO: 188129 - DNA, 16 bp, Unknown
  misc_feature (1)..( 16): Result.005 file - promoters50/4766983
taaacattagggttct

SEQ ID NO: 188130 - DNA, 16 bp, Unknown
  misc_feature (1)..( 16): Result.005 file - promoters50/4766983
gatcaatttgggatct

SEQ ID NO: 188131 - DNA, 16 bp, Unknown
  misc_feature (1)..( 16): Result.005 file - promoters50/4766983
atcaaattgacatatt

SEQ ID NO: 188132 - DNA, 16 bp, Unknown
  misc_feature (1)..( 16): Result.005 file - promoters50/4766983
agaaaattgacttcaa

SEQ ID NO: 188133 - DNA, 7 bp, Unknown
  misc_feature (1)..( 7): Result.005 file - promoters50/4766983
aaaaata

SEQ ID NO: 188134 - DNA, 7 bp, Unknown
  misc_feature (1)..( 7): Result.005 file - promoters50/4766983
aaatata

SEQ ID NO: 188135 - DNA, 7 bp, Unknown
  misc_feature (1)..( 7): Result.005 file - promoters50/4766983
gaatata

SEQ ID NO: 188136 - DNA, 7 bp, Unknown
  misc_feature (1)..( 7): Result.005 file - promoters50/4766983
taaaaaa

SEQ ID NO: 188137 - DNA, 7 bp, Unknown
  misc_feature (1)..( 7): Result.005 file - promoters50/4766983
taaaaat

SEQ ID NO: 188138 - DNA, 7 bp, Unknown
  misc_feature (1)..( 7): Result.005 file - promoters50/4766983
caaaaaa

SEQ ID NO: 188139 - DNA, 8 bp, Unknown
  misc_feature (1)..( 8): Result.005 file - promoters50/4766983
ttgttttt

SEQ ID NO: 188140 - DNA, 8 bp, Unknown
  misc_feature (1)..( 8): Result.005 file - promoters50/4766983
ttgttttt

SEQ ID NO: 188141 - DNA, 8 bp, Unknown
  misc_feature (1)..( 8): Result.005 file - promoters50/4766983
atgtttta

SEQ ID NO: 188142 - DNA, 8 bp, Unknown
  misc_feature (1)..( 8): Result.005 file - promoters50/4766983
aatctaag

SEQ ID NO: 188143 - DNA, 8 bp, Unknown
  misc_feature (1)..( 8): Result.005 file - promoters50/4766983
aatcaaag

SEQ ID NO: 188144 - DNA, 8 bp, Unknown
  misc_feature (1)..( 8): Result.005 file - promoters50/4766983
aatcaaaa

SEQ ID NO: 188145 - DNA, 13 bp, Unknown
  misc_feature (1)..( 13): Result.005 file - promoters50/4766983
aacttgaattcaa

SEQ ID NO: 188146 - DNA, 13 bp, Unknown
  misc_feature (1)..( 13): Result.005 file - promoters50/4766983
aaattgacttcaa

SEQ ID NO: 188147 - DNA, 13 bp, Unknown
  misc_feature (1)..( 13): Result.005 file - promoters50/4766983
aaattgacatatt

SEQ ID NO: 188148 - DNA, 11 bp, Unknown
  misc_feature (1)..( 11): Result.005 file - promoters50/4766991
ataaaagaaaa

SEQ ID NO: 188149 - DNA, 11 bp, Unknown
  misc_feature (1)..( 11): Result.005 file - promoters50/4766991
gtaaaagaaaa

SEQ ID NO: 188150 - DNA, 11 bp, Unknown
  misc_feature (1)..( 11): Result.005 file - promoters50/4766991
ataaaaaaact

SEQ ID NO: 188151 - DNA, 10 bp, Unknown
  misc_feature (1)..( 10): Result.005 file - promoters50/4766991
caatacataa

SEQ ID NO: 188152 - DNA, 10 bp, Unknown
  misc_feature (1)..( 10): Result.005 file - promoters50/4766991
aaatatataa

SEQ ID NO: 188153 - DNA, 11 bp, Unknown
  misc_feature (1)..( 11): Result.005 file - promoters50/4766991
aaaaagtatga

SEQ ID NO: 188154 - DNA, 7 bp, Unknown
  misc_feature (1)..( 7): Result.005 file - promoters50/4767003
cattctc

SEQ ID NO: 188155 - DNA, 7 bp, Unknown
  misc_feature (1)..( 7): Result.005 file - promoters50/4767003
cattcta

SEQ ID NO: 188156 - DNA, 7 bp, Unknown
  misc_feature (1)..( 7): Result.005 file - promoters50/4767003
catacta

SEQ ID NO: 188157 - DNA, 8 bp, Unknown
  misc_feature (1)..( 8): Result.005 file - promoters50/4767024
gaataaac

SEQ ID NO: 188158 - DNA, 8 bp, Unknown
  misc_feature (1)..( 8): Result.005 file - promoters50/4767024
aaataaaa

SEQ ID NO: 188159 - DNA, 9 bp, Unknown
  misc_feature (1)..( 9): Result.005 file - promoters50/4767024
gatataaaa

SEQ ID NO: 188160 - DNA, 9 bp, Unknown
  misc_feature (1)..( 9): Result.005 file - promoters50/4767024
caactaaga

SEQ ID NO: 188161 - DNA, 16 bp, Unknown
  misc_feature (1)..( 16): Result.005 file - promoters50/4767038
cattaacaaataaaaa

SEQ ID NO: 188162 - DNA, 16 bp, Unknown
  misc_feature (1)..( 16): Result.005 file - promoters50/4767038
agttaataaatacgaa

SEQ ID NO: 188163 - DNA, 16 bp, Unknown
  misc_feature (1)..( 16): Result.005 file - promoters50/4767038
gactttaaaatgaaaa

SEQ ID NO: 188164 - DNA, 16 bp, Unknown
  misc_feature (1)..( 16): Result.005 file - promoters50/4767038
tggcgggagatggaaa

SEQ ID NO: 188165 - DNA, 16 bp, Unknown
  misc_feature (1)..( 16): Result.005 file - promoters50/4767038
ttttattaaatcaact

SEQ ID NO: 188166 - DNA, 16 bp, Unknown
  misc_feature (1)..( 16): Result.005 file - promoters50/4767038
agttaatatttcattt

SEQ ID NO: 188167 - DNA, 8 bp, Unknown
  misc_feature (1)..( 8): Result.005 file - promoters50/4767050
atagaaaa

SEQ ID NO: 188168 - DNA, 8 bp, Unknown
  misc_feature (1)..( 8): Result.005 file - promoters50/4767050
atataaat

SEQ ID NO: 188169 - DNA, 8 bp, Unknown
  misc_feature (1)..( 8): Result.005 file - promoters50/4767050
aaataaat

SEQ ID NO: 188170 - DNA, 10 bp, Unknown
  misc_feature (1)..( 10): Result.005 file - promoters50/4767054
atttctcaac

SEQ ID NO: 188171 - DNA, 10 bp, Unknown
  misc_feature (1)..( 10): Result.005 file - promoters50/4767054
ttttctctcc

SEQ ID NO: 188172 - DNA, 10 bp, Unknown
  misc_feature (1)..( 10): Result.005 file - promoters50/4767054
atttcacaac

SEQ ID NO: 188173 - DNA, 7 bp, Unknown
  misc_feature (1)..( 7): Result.005 file - promoters50/4767054
aaacata

SEQ ID NO: 188174 - DNA, 7 bp, Unknown
  misc_feature (1)..( 7): Result.005 file - promoters50/4767054
aaacata

SEQ ID NO: 188175 - DNA, 7 bp, Unknown
  misc_feature (1)..( 7): Result.005 file - promoters50/4767054
aaaaata

SEQ ID NO: 188176 - DNA, 8 bp, Unknown
  misc_feature (1)..( 8): Result.005 file - promoters50/4767059
gaacttct

SEQ ID NO: 188177 - DNA, 8 bp, Unknown
  misc_feature (1)..( 8): Result.005 file - promoters50/4767059
gaactttg

SEQ ID NO: 188178 - DNA, 8 bp, Unknown
  misc_feature (1)..( 8): Result.005 file - promoters50/4767059
gaattttg

SEQ ID NO: 188179 - DNA, 7 bp, Unknown
  misc_feature (1)..( 7): Result.005 file - promoters50/4767059
gaaattt

SEQ ID NO: 188180 - DNA, 7 bp, Unknown
  misc_feature (1)..( 7): Result.005 file - promoters50/4767059
taaattt

SEQ ID NO: 188181 - DNA, 7 bp, Unknown
  misc_feature (1)..( 7): Result.005 file - promoters50/4767059
taaatta

SEQ ID NO: 188182 - DNA, 7 bp, Unknown
  misc_feature (1)..( 7): Result.005 file - promoters50/4767063
tttcttt

SEQ ID NO: 188183 - DNA, 7 bp, Unknown
  misc_feature (1)..( 7): Result.005 file - promoters50/4767063
tttattt

SEQ ID NO: 188184 - DNA, 7 bp, Unknown
  misc_feature (1)..( 7): Result.005 file - promoters50/4767063
tttcttc

SEQ ID NO: 188185 - DNA, 7 bp, Unknown
  misc_feature (1)..( 7): Result.005 file - promoters50/4767063
aaactga

SEQ ID NO: 188186 - DNA, 7 bp, Unknown
  misc_feature (1)..( 7): Result.005 file - promoters50/4767063
aaaatga

SEQ ID NO: 188187 - DNA, 7 bp, Unknown
  misc_feature (1)..( 7): Result.005 file - promoters50/4767063
caaatga

SEQ ID NO: 188188 - DNA, 9 bp, Unknown
  misc_feature (1)..( 9): Result.005 file - promoters50/4767063
atttcatga

SEQ ID NO: 188189 - DNA, 9 bp, Unknown
  misc_feature (1)..( 9): Result.005 file - promoters50/4767063
attttatgt

SEQ ID NO: 188190 - DNA, 9 bp, Unknown
  misc_feature (1)..( 9): Result.005 file - promoters50/4767063
gacttatgt

SEQ ID NO: 188191 - DNA, 11 bp, Unknown
  misc_feature (1)..( 11): Result.005 file - promoters50/4767063
tgaaattataa

SEQ ID NO: 188192 - DNA, 11 bp, Unknown
  misc_feature (1)..( 11): Result.005 file - promoters50/4767063
attaattataa

SEQ ID NO: 188193 - DNA, 11 bp, Unknown
  misc_feature (1)..( 11): Result.005 file - promoters50/4767063
attaattaatt

SEQ ID NO: 188194 - DNA, 8 bp, Unknown
  misc_feature (1)..( 8): Result.005 file - promoters50/4767066
cttagtca

SEQ ID NO: 188195 - DNA, 8 bp, Unknown
  misc_feature (1)..( 8): Result.005 file - promoters50/4767066
tttaatca

SEQ ID NO: 188196 - DNA, 8 bp, Unknown
  misc_feature (1)..( 8): Result.005 file - promoters50/4767066
agtaatga

SEQ ID NO: 188197 - DNA, 9 bp, Unknown
  misc_feature (1)..( 9): Result.005 file - promoters50/4767066
gatttttac

SEQ ID NO: 188198 - DNA, 9 bp, Unknown
  misc_feature (1)..( 9): Result.005 file - promoters50/4767066
aatttttca

SEQ ID NO: 188199 - DNA, 9 bp, Unknown
  misc_feature (1)..( 9): Result.005 file - promoters50/4767066
tattattca

SEQ ID NO: 188200 - DNA, 9 bp, Unknown
  misc_feature (1)..( 9): Result.005 file - promoters50/4767066
tattattga

SEQ ID NO: 188201 - DNA, 8 bp, Unknown
  misc_feature (1)..( 8): Result.005 file - promoters50/4767066
cattgatg

SEQ ID NO: 188202 - DNA, 8 bp, Unknown
  misc_feature (1)..( 8): Result.005 file - promoters50/4767066
tattgatc

SEQ ID NO: 188203 - DNA, 8 bp, Unknown
  misc_feature (1)..( 8): Result.005 file - promoters50/4767066
catttatg

SEQ ID NO: 188204 - DNA, 8 bp, Unknown
  misc_feature (1)..( 8): Result.005 file - promoters50/4767066
caaaaact

SEQ ID NO: 188205 - DNA, 8 bp, Unknown
  misc_feature (1)..( 8): Result.005 file - promoters50/4767066
caaaaact

SEQ ID NO: 188206 - DNA, 8 bp, Unknown
  misc_feature (1)..( 8): Result.005 file - promoters50/4767066
gcaaaact

SEQ ID NO: 188207 - DNA, 7 bp, Unknown
  misc_feature (1)..( 7): Result.005 file - promoters50/4767066
gagaaat

SEQ ID NO: 188208 - DNA, 7 bp, Unknown
  misc_feature (1)..( 7): Result.005 file - promoters50/4767066
aagaaat

SEQ ID NO: 188209 - DNA, 7 bp, Unknown
  misc_feature (1)..( 7): Result.005 file - promoters50/4767066
taaaaaa

SEQ ID NO: 188210 - DNA, 9 bp, Unknown
  misc_feature (1)..( 9): Result.005 file - promoters50/4767066
gctttcttt

SEQ ID NO: 188211 - DNA, 9 bp, Unknown
  misc_feature (1)..( 9): Result.005 file - promoters50/4767066
aattttttt

SEQ ID NO: 188212 - DNA, 9 bp, Unknown
  misc_feature (1)..( 9): Result.005 file - promoters50/4767066
aatttttag

SEQ ID NO: 188213 - DNA, 9 bp, Unknown
  misc_feature (1)..( 9): Result.005 file - promoters50/4767066
taaaacatt

SEQ ID NO: 188214 - DNA, 9 bp, Unknown
  misc_feature (1)..( 9): Result.005 file - promoters50/4767066
aaaaacaaa

SEQ ID NO: 188215 - DNA, 9 bp, Unknown
  misc_feature (1)..( 9): Result.005 file - promoters50/4767066
aaaaagaaa

SEQ ID NO: 188216 - DNA, 13 bp, Unknown
  misc_feature (1)..( 13): Result.005 file - promoters50/4767066
gtgactaattctt

SEQ ID NO: 188217 - DNA, 13 bp, Unknown
  misc_feature (1)..( 13): Result.005 file - promoters50/4767066
tttgcaaattctc

SEQ ID NO: 188218 - DNA, 14 bp, Unknown
  misc_feature (1)..( 14): Result.005 file - promoters50/4767066
tttttcaatttctc

SEQ ID NO: 188219 - DNA, 8 bp, Unknown
  misc_feature (1)..( 8): Result.005 file - promoters50/4767085
aaaacttt

SEQ ID NO: 188220 - DNA, 8 bp, Unknown
  misc_feature (1)..( 8): Result.005 file - promoters50/4767085
aaaatttt

SEQ ID NO: 188221 - DNA, 8 bp, Unknown
  misc_feature (1)..( 8): Result.005 file - promoters50/4767085
aaaactat

SEQ ID NO: 188222 - DNA, 8 bp, Unknown
  misc_feature (1)..( 8): Result.005 file - promoters50/4767085
caaatttc

SEQ ID NO: 188223 - DNA, 14 bp, Unknown
  misc_feature (1)..( 14): Result.005 file - promoters50/4767085
cataaattagacaa

SEQ ID NO: 188224 - DNA, 14 bp, Unknown
  misc_feature (1)..( 14): Result.005 file - promoters50/4767085
tataatttagtcat

SEQ ID NO: 188225 - DNA, 14 bp, Unknown
  misc_feature (1)..( 14): Result.005 file - promoters50/4767085
tattattcgttgtt

SEQ ID NO: 188226 - DNA, 14 bp, Unknown
  misc_feature (1)..( 14): Result.005 file - promoters50/4767085
aaatatttagacat

SEQ ID NO: 188227 - DNA, 11 bp, Unknown
  misc_feature (1)..( 11): Result.005 file - promoters50/4767103
tcactggttta

SEQ ID NO: 188228 - DNA, 11 bp, Unknown
  misc_feature (1)..( 11): Result.005 file - promoters50/4767103
gttctgattta

SEQ ID NO: 188229 - DNA, 11 bp, Unknown
  misc_feature (1)..( 11): Result.005 file - promoters50/4767103
tcactggttta

SEQ ID NO: 188230 - DNA, 8 bp, Unknown
  misc_feature (1)..( 8): Result.005 file - promoters50/4767103
ggagattt

SEQ ID NO: 188231 - DNA, 8 bp, Unknown
  misc_feature (1)..( 8): Result.005 file - promoters50/4767103
ggaaattt

SEQ ID NO: 188232 - DNA, 8 bp, Unknown
  misc_feature (1)..( 8): Result.005 file - promoters50/4767103
agaatttt

SEQ ID NO: 188233 - DNA, 10 bp, Unknown
  misc_feature (1)..( 10): Result.005 file - promoters50/4767109
aatacaataa

SEQ ID NO: 188234 - DNA, 10 bp, Unknown
  misc_feature (1)..( 10): Result.005 file - promoters50/4767109
gatacaaaat

SEQ ID NO: 188235 - DNA, 10 bp, Unknown
  misc_feature (1)..( 10): Result.005 file - promoters50/4767109
gataaaaaat

SEQ ID NO: 188236 - DNA, 7 bp, Unknown
  misc_feature (1)..( 7): Result.005 file - promoters50/4767109
tttaatt

SEQ ID NO: 188237 - DNA, 7 bp, Unknown
  misc_feature (1)..( 7): Result.005 file - promoters50/4767109
tttcatt

SEQ ID NO: 188238 - DNA, 7 bp, Unknown
  misc_feature (1)..( 7): Result.005 file - promoters50/4767109
tttaata

SEQ ID NO: 188239 - DNA, 11 bp, Unknown
  misc_feature (1)..( 11): Result.005 file - promoters50/4767109
aataaacaata

SEQ ID NO: 188240 - DNA, 11 bp, Unknown
  misc_feature (1)..( 11): Result.005 file - promoters50/4767109
gataaaaaata

SEQ ID NO: 188241 - DNA, 11 bp, Unknown
  misc_feature (1)..( 11): Result.005 file - promoters50/4767109
gatacaaaatc

SEQ ID NO: 188242 - DNA, 10 bp, Unknown
  misc_feature (1)..( 10): Result.005 file - promoters50/4767109
tctctatata

SEQ ID NO: 188243 - DNA, 10 bp, Unknown
  misc_feature (1)..( 10): Result.005 file - promoters50/4767109
cctatatata

SEQ ID NO: 188244 - DNA, 10 bp, Unknown
  misc_feature (1)..( 10): Result.005 file - promoters50/4767109
tctgtatatt

SEQ ID NO: 188245 - DNA, 7 bp, Unknown
  misc_feature (1)..( 7): Result.005 file - promoters50/4767109
caatttt

SEQ ID NO: 188246 - DNA, 7 bp, Unknown
  misc_feature (1)..( 7): Result.005 file - promoters50/4767109
caaattt

SEQ ID NO: 188247 - DNA, 7 bp, Unknown
  misc_feature (1)..( 7): Result.005 file - promoters50/4767109
caaatta

SEQ ID NO: 188248 - DNA, 10 bp, Unknown
  misc_feature (1)..( 10): Result.005 file - promoters50/4767129
tttatgtatt

SEQ ID NO: 188249 - DNA, 10 bp, Unknown
  misc_feature (1)..( 10): Result.005 file - promoters50/4767129
attttgtatt

SEQ ID NO: 188250 - DNA, 10 bp, Unknown
  misc_feature (1)..( 10): Result.005 file - promoters50/4767129
tttctgtata

SEQ ID NO: 188251 - DNA, 7 bp, Unknown
  misc_feature (1)..( 7): Result.005 file - promoters50/4767129
tttctct

SEQ ID NO: 188252 - DNA, 7 bp, Unknown
  misc_feature (1)..( 7): Result.005 file - promoters50/4767129
tttttct

SEQ ID NO: 188253 - DNA, 7 bp, Unknown
  misc_feature (1)..( 7): Result.005 file - promoters50/4767129
tttctgt

SEQ ID NO: 188254 - DNA, 9 bp, Unknown
  misc_feature (1)..( 9): Result.005 file - promoters50/4767129
taataaact

SEQ ID NO: 188255 - DNA, 9 bp, Unknown
  misc_feature (1)..( 9): Result.005 file - promoters50/4767129
tcataaact

SEQ ID NO: 188256 - DNA, 9 bp, Unknown
  misc_feature (1)..( 9): Result.005 file - promoters50/4767129
tcaaaaaca

SEQ ID NO: 188257 - DNA, 9 bp, Unknown
  misc_feature (1)..( 9): Result.005 file - promoters50/4767133
aaattattt

SEQ ID NO: 188258 - DNA, 9 bp, Unknown
  misc_feature (1)..( 9): Result.005 file - promoters50/4767133
ggtttattt

SEQ ID NO: 188259 - DNA, 9 bp, Unknown
  misc_feature (1)..( 9): Result.005 file - promoters50/4767133
aaatgattt

SEQ ID NO: 188260 - DNA, 8 bp, Unknown
  misc_feature (1)..( 8): Result.005 file - promoters50/4767133
ttaatgta

SEQ ID NO: 188261 - DNA, 8 bp, Unknown
  misc_feature (1)..( 8): Result.005 file - promoters50/4767133
ttagtgta

SEQ ID NO: 188262 - DNA, 8 bp, Unknown
  misc_feature (1)..( 8): Result.005 file - promoters50/4767133
ataatgtc

SEQ ID NO: 188263 - DNA, 9 bp, Unknown
  misc_feature (1)..( 9): Result.005 file - promoters50/4767148
attcatatg

SEQ ID NO: 188264 - DNA, 9 bp, Unknown
  misc_feature (1)..( 9): Result.005 file - promoters50/4767148
attgatata

SEQ ID NO: 188265 - DNA, 9 bp, Unknown
  misc_feature (1)..( 9): Result.005 file - promoters50/4767148
atttatata

SEQ ID NO: 188266 - DNA, 9 bp, Unknown
  misc_feature (1)..( 9): Result.005 file - promoters50/4767148
tactatata

SEQ ID NO: 188267 - DNA, 9 bp, Unknown
  misc_feature (1)..( 9): Result.005 file - promoters50/4767148
atttcttac

SEQ ID NO: 188268 - DNA, 9 bp, Unknown
  misc_feature (1)..( 9): Result.005 file - promoters50/4767148
atttctaca

SEQ ID NO: 188269 - DNA, 9 bp, Unknown
  misc_feature (1)..( 9): Result.005 file - promoters50/4767148
attcctttg

SEQ ID NO: 188270 - DNA, 9 bp, Unknown
  misc_feature (1)..( 9): Result.005 file - promoters50/4767148
ttttcgtac

SEQ ID NO: 188271 - DNA, 12 bp, Unknown
  misc_feature (1)..( 12): Result.005 file - promoters50/4767148
aacaaatttgac

SEQ ID NO: 188272 - DNA, 12 bp, Unknown
  misc_feature (1)..( 12): Result.005 file - promoters50/4767148
agtaaatttgac

SEQ ID NO: 188273 - DNA, 12 bp, Unknown
  misc_feature (1)..( 12): Result.005 file - promoters50/4767148
agtatatttgaa

SEQ ID NO: 188274 - DNA, 12 bp, Unknown
  misc_feature (1)..( 12): Result.005 file - promoters50/4767148
agtaactttaga

SEQ ID NO: 188275 - DNA, 8 bp, Unknown
  misc_feature (1)..( 8): Result.005 file - promoters50/4767148
gcttatta

SEQ ID NO: 188276 - DNA, 8 bp, Unknown
  misc_feature (1)..( 8): Result.005 file - promoters50/4767148
gtttatta

SEQ ID NO: 188277 - DNA, 8 bp, Unknown
  misc_feature (1)..( 8): Result.005 file - promoters50/4767148
atttatta

SEQ ID NO: 188278 - DNA, 8 bp, Unknown
  misc_feature (1)..( 8): Result.005 file - promoters50/4767148
atttattc

SEQ ID NO: 188279 - DNA, 6 bp, Unknown
  misc_feature (1)..( 6): Result.005 file - promoters50/4767156
aaaatt

SEQ ID NO: 188280 - DNA, 6 bp, Unknown
  misc_feature (1)..( 6): Result.005 file - promoters50/4767156
aaaatt

SEQ ID NO: 188281 - DNA, 6 bp, Unknown
  misc_feature (1)..( 6): Result.005 file - promoters50/4767156
aaaatt

SEQ ID NO: 188282 - DNA, 15 bp, Unknown
  misc_feature (1)..( 15): Result.005 file - promoters50/4767156
aaaaagtaaaaaaca

SEQ ID NO: 188283 - DNA, 15 bp, Unknown
  misc_feature (1)..( 15): Result.005 file - promoters50/4767156
taaaattaaagaaca

SEQ ID NO: 188284 - DNA, 15 bp, Unknown
  misc_feature (1)..( 15): Result.005 file - promoters50/4767156
taaaatgttgtcatt

SEQ ID NO: 188285 - DNA, 8 bp, Unknown
  misc_feature (1)..( 8): Result.005 file - promoters50/4767169
tttttttg

SEQ ID NO: 188286 - DNA, 8 bp, Unknown
  misc_feature (1)..( 8): Result.005 file - promoters50/4767169
gtttattg

SEQ ID NO: 188287 - DNA, 8 bp, Unknown
  misc_feature (1)..( 8): Result.005 file - promoters50/4767169
gtttatcg

SEQ ID NO: 188288 - DNA, 7 bp, Unknown
  misc_feature (1)..( 7): Result.005 file - promoters50/4767199
atttttc

SEQ ID NO: 188289 - DNA, 7 bp, Unknown
  misc_feature (1)..( 7): Result.005 file - promoters50/4767199
atttttt

SEQ ID NO: 188290 - DNA, 8 bp, Unknown
  misc_feature (1)..( 8): Result.005 file - promoters50/4767199
atttattt

SEQ ID NO: 188291 - DNA, 8 bp, Unknown
  misc_feature (1)..( 8): Result.005 file - promoters50/4767199
ctttgttc

SEQ ID NO: 188292 - DNA, 8 bp, Unknown
  misc_feature (1)..( 8): Result.005 file - promoters50/4767199
tttttttc

SEQ ID NO: 188293 - DNA, 8 bp, Unknown
  misc_feature (1)..( 8): Result.005 file - promoters50/4767199
atttattt

SEQ ID NO: 188294 - DNA, 8 bp, Unknown
  misc_feature (1)..( 8): Result.005 file - promoters50/4767199
atttaaaa

SEQ ID NO: 188295 - DNA, 8 bp, Unknown
  misc_feature (1)..( 8): Result.005 file - promoters50/4767199
attaaaaa

SEQ ID NO: 188296 - DNA, 8 bp, Unknown
  misc_feature (1)..( 8): Result.005 file - promoters50/4767199
attagaaa

SEQ ID NO: 188297 - DNA, 10 bp, Unknown
  misc_feature (1)..( 10): Result.005 file - promoters50/4767199
taatttatgc

SEQ ID NO: 188298 - DNA, 10 bp, Unknown
  misc_feature (1)..( 10): Result.005 file - promoters50/4767199
taatttattt

SEQ ID NO: 188299 - DNA, 10 bp, Unknown
  misc_feature (1)..( 10): Result.005 file - promoters50/4767199
tcattttttt

SEQ ID NO: 188300 - DNA, 10 bp, Unknown
  misc_feature (1)..( 10): Result.005 file - promoters50/4767199
caatctaaga

SEQ ID NO: 188301 - DNA, 10 bp, Unknown
  misc_feature (1)..( 10): Result.005 file - promoters50/4767199
taatcttaga

SEQ ID NO: 188302 - DNA, 10 bp, Unknown
  misc_feature (1)..( 10): Result.005 file - promoters50/4767199
taatattaag

SEQ ID NO: 188303 - DNA, 9 bp, Unknown
  misc_feature (1)..( 9): Result.005 file - promoters50/4767226
tatagtctt

SEQ ID NO: 188304 - DNA, 9 bp, Unknown
  misc_feature (1)..( 9): Result.005 file - promoters50/4767226
aatattctt

SEQ ID NO: 188305 - DNA, 9 bp, Unknown
  misc_feature (1)..( 9): Result.005 file - promoters50/4767226
aatattgtt

SEQ ID NO: 188306 - DNA, 12 bp, Unknown
  misc_feature (1)..( 12): Result.005 file - promoters50/4767230
taaattttcaaa

SEQ ID NO: 188307 - DNA, 12 bp, Unknown
  misc_feature (1)..( 12): Result.005 file - promoters50/4767230
aaaatcttcaac

SEQ ID NO: 188308 - DNA, 13 bp, Unknown
  misc_feature (1)..( 13): Result.005 file - promoters50/4767230
aaatatcttaaac

SEQ ID NO: 188309 - DNA, 15 bp, Unknown
  misc_feature (1)..( 15): Result.005 file - promoters50/4767230
aaaagagttttgcac

SEQ ID NO: 188310 - DNA, 15 bp, Unknown
  misc_feature (1)..( 15): Result.005 file - promoters50/4767230
attttactttggcaa

SEQ ID NO: 188311 - DNA, 15 bp, Unknown
  misc_feature (1)..( 15): Result.005 file - promoters50/4767230
atttgactttgacaa

SEQ ID NO: 188312 - DNA, 9 bp, Unknown
  misc_feature (1)..( 9): Result.005 file - promoters50/4767255
ccttttctt

SEQ ID NO: 188313 - DNA, 9 bp, Unknown
  misc_feature (1)..( 9): Result.005 file - promoters50/4767255
ccttctctt

SEQ ID NO: 188314 - DNA, 9 bp, Unknown
  misc_feature (1)..( 9): Result.005 file - promoters50/4767255
ctctctctt

SEQ ID NO: 188315 - DNA, 7 bp, Unknown
  misc_feature (1)..( 7): Result.005 file - promoters50/4767267
ttttaat

SEQ ID NO: 188316 - DNA, 7 bp, Unknown
  misc_feature (1)..( 7): Result.005 file - promoters50/4767267
atttaat

SEQ ID NO: 188317 - DNA, 7 bp, Unknown
  misc_feature (1)..( 7): Result.005 file - promoters50/4767267
attgaat

SEQ ID NO: 188318 - DNA, 10 bp, Unknown
  misc_feature (1)..( 10): Result.005 file - promoters50/4767267
aatttatgta

SEQ ID NO: 188319 - DNA, 10 bp, Unknown
  misc_feature (1)..( 10): Result.005 file - promoters50/4767267
aatatattga

SEQ ID NO: 188320 - DNA, 10 bp, Unknown
  misc_feature (1)..( 10): Result.005 file - promoters50/4767267
aataaattga

SEQ ID NO: 188321 - DNA, 11 bp, Unknown
  misc_feature (1)..( 11): Result.005 file - promoters50/4767267
aattgaaaaag

SEQ ID NO: 188322 - DNA, 11 bp, Unknown
  misc_feature (1)..( 11): Result.005 file - promoters50/4767267
ataagaagaag

SEQ ID NO: 188323 - DNA, 11 bp, Unknown
  misc_feature (1)..( 11): Result.005 file - promoters50/4767267
aatttaaaata

SEQ ID NO: 188324 - DNA, 9 bp, Unknown
  misc_feature (1)..( 9): Result.005 file - promoters50/4767279
ttaacattg

SEQ ID NO: 188325 - DNA, 9 bp, Unknown
  misc_feature (1)..( 9): Result.005 file - promoters50/4767279
ctaaccttg

SEQ ID NO: 188326 - DNA, 9 bp, Unknown
  misc_feature (1)..( 9): Result.005 file - promoters50/4767279
ttaacaaaa

SEQ ID NO: 188327 - DNA, 9 bp, Unknown
  misc_feature (1)..( 9): Result.005 file - promoters50/4767279
attaaaagg

SEQ ID NO: 188328 - DNA, 9 bp, Unknown
  misc_feature (1)..( 9): Result.005 file - promoters50/4767279
taaaaaagg

SEQ ID NO: 188329 - DNA, 9 bp, Unknown
  misc_feature (1)..( 9): Result.005 file - promoters50/4767279
attcaaaga

SEQ ID NO: 188330 - DNA, 9 bp, Unknown
  misc_feature (1)..( 9): Result.005 file - promoters50/4767283
atttacttt

SEQ ID NO: 188331 - DNA, 9 bp, Unknown
  misc_feature (1)..( 9): Result.005 file - promoters50/4767283
acttatttt

SEQ ID NO: 188332 - DNA, 10 bp, Unknown
  misc_feature (1)..( 10): Result.005 file - promoters50/4767283
aattaactat

SEQ ID NO: 188333 - DNA, 7 bp, Unknown
  misc_feature (1)..( 7): Result.005 file - promoters50/4767283
caaatta

SEQ ID NO: 188334 - DNA, 7 bp, Unknown
  misc_feature (1)..( 7): Result.005 file - promoters50/4767283
taaatta

SEQ ID NO: 188335 - DNA, 7 bp, Unknown
  misc_feature (1)..( 7): Result.005 file - promoters50/4767283
taaattg

SEQ ID NO: 188336 - DNA, 12 bp, Unknown
  misc_feature (1)..( 12): Result.005 file - promoters50/4767294
aaagatttttga

SEQ ID NO: 188337 - DNA, 12 bp, Unknown
  misc_feature (1)..( 12): Result.005 file - promoters50/4767294
aaaaattcttga

SEQ ID NO: 188338 - DNA, 12 bp, Unknown
  misc_feature (1)..( 12): Result.005 file - promoters50/4767294
aaagattattat

SEQ ID NO: 188339 - DNA, 12 bp, Unknown
  misc_feature (1)..( 12): Result.005 file - promoters50/4767294
taaacttcacat

SEQ ID NO: 188340 - DNA, 13 bp, Unknown
  misc_feature (1)..( 13): Result.005 file - promoters50/4767294
aaataataaatca

SEQ ID NO: 188341 - DNA, 13 bp, Unknown
  misc_feature (1)..( 13): Result.005 file - promoters50/4767294
actaaattaaaag

SEQ ID NO: 188342 - DNA, 13 bp, Unknown
  misc_feature (1)..( 13): Result.005 file - promoters50/4767298
tcctaaaatagtt

SEQ ID NO: 188343 - DNA, 13 bp, Unknown
  misc_feature (1)..( 13): Result.005 file - promoters50/4767298
tcctaaaatcaag

SEQ ID NO: 188344 - DNA, 13 bp, Unknown
  misc_feature (1)..( 13): Result.005 file - promoters50/4767298
atgaaaaataaac

SEQ ID NO: 188345 - DNA, 13 bp, Unknown
  misc_feature (1)..( 13): Result.005 file - promoters50/4767298
cattaaaatattc

SEQ ID NO: 188346 - DNA, 13 bp, Unknown
  misc_feature (1)..( 13): Result.005 file - promoters50/4767298
ttttaaaatatag

SEQ ID NO: 188347 - DNA, 13 bp, Unknown
  misc_feature (1)..( 13): Result.005 file - promoters50/4767298
ttgacaaataaac

SEQ ID NO: 188348 - DNA, 13 bp, Unknown
  misc_feature (1)..( 13): Result.005 file - promoters50/4767298
atctaatatatat

SEQ ID NO: 188349 - DNA, 12 bp, Unknown
  misc_feature (1)..( 12): Result.005 file - promoters50/4767298
tttcaagtaagt

SEQ ID NO: 188350 - DNA, 12 bp, Unknown
  misc_feature (1)..( 12): Result.005 file - promoters50/4767298
aatcaagtgaag

SEQ ID NO: 188351 - DNA, 12 bp, Unknown
  misc_feature (1)..( 12): Result.005 file - promoters50/4767298
tgacaaataaac

SEQ ID NO: 188352 - DNA, 12 bp, Unknown
  misc_feature (1)..( 12): Result.005 file - promoters50/4767298
tgaaaaataaac

SEQ ID NO: 188353 - DNA, 12 bp, Unknown
  misc_feature (1)..( 12): Result.005 file - promoters50/4767298
gataaattaaaa

SEQ ID NO: 188354 - DNA, 12 bp, Unknown
  misc_feature (1)..( 12): Result.005 file - promoters50/4767298
gacgaattcaaa

SEQ ID NO: 188355 - DNA, 10 bp, Unknown
  misc_feature (1)..( 10): Result.005 file - promoters50/4767298
tatgtcacta

SEQ ID NO: 188356 - DNA, 10 bp, Unknown
  misc_feature (1)..( 10): Result.005 file - promoters50/4767298
tatttcattt

SEQ ID NO: 188357 - DNA, 10 bp, Unknown
  misc_feature (1)..( 10): Result.005 file - promoters50/4767298
tatttccttc

SEQ ID NO: 188358 - DNA, 10 bp, Unknown
  misc_feature (1)..( 10): Result.005 file - promoters50/4767298
tatatcacaa

SEQ ID NO: 188359 - DNA, 10 bp, Unknown
  misc_feature (1)..( 10): Result.005 file - promoters50/4767298
aatatcaata

SEQ ID NO: 188360 - DNA, 10 bp, Unknown
  misc_feature (1)..( 10): Result.005 file - promoters50/4767298
aatctcaata

SEQ ID NO: 188361 - DNA, 11 bp, Unknown
  misc_feature (1)..( 11): Result.005 file - promoters50/4767298
ttaaaaaggaa

SEQ ID NO: 188362 - DNA, 11 bp, Unknown
  misc_feature (1)..( 11): Result.005 file - promoters50/4767298
ttaaaaagtga

SEQ ID NO: 188363 - DNA, 11 bp, Unknown
  misc_feature (1)..( 11): Result.005 file - promoters50/4767298
caaaaaagaaa

SEQ ID NO: 188364 - DNA, 11 bp, Unknown
  misc_feature (1)..( 11): Result.005 file - promoters50/4767298
cagaaatgaat

SEQ ID NO: 188365 - DNA, 11 bp, Unknown
  misc_feature (1)..( 11): Result.005 file - promoters50/4767298
gaataaattgt

SEQ ID NO: 188366 - DNA, 11 bp, Unknown
  misc_feature (1)..( 11): Result.005 file - promoters50/4767298
tgagaaagaaa

SEQ ID NO: 188367 - DNA, 13 bp, Unknown
  misc_feature (1)..( 13): Result.005 file - promoters50/4767298
aaaaatatttcga

SEQ ID NO: 188368 - DNA, 13 bp, Unknown
  misc_feature (1)..( 13): Result.005 file - promoters50/4767298
taaaatatcaata

SEQ ID NO: 188369 - DNA, 13 bp, Unknown
  misc_feature (1)..( 13): Result.005 file - promoters50/4767298
tgaaatattactc

SEQ ID NO: 188370 - DNA, 13 bp, Unknown
  misc_feature (1)..( 13): Result.005 file - promoters50/4767298
gataatatttcat

SEQ ID NO: 188371 - DNA, 13 bp, Unknown
  misc_feature (1)..( 13): Result.005 file - promoters50/4767298
taaaatacagtag

SEQ ID NO: 188372 - DNA, 13 bp, Unknown
  misc_feature (1)..( 13): Result.005 file - promoters50/4767298
tgcaatctcaata

SEQ ID NO: 188373 - DNA, 13 bp, Unknown
  misc_feature (1)..( 13): Result.005 file - promoters50/4767298
ctttttataatca

SEQ ID NO: 188374 - DNA, 13 bp, Unknown
  misc_feature (1)..( 13): Result.005 file - promoters50/4767298
gacattataaaat

SEQ ID NO: 188375 - DNA, 13 bp, Unknown
  misc_feature (1)..( 13): Result.005 file - promoters50/4767298
ctttttttaacaa

SEQ ID NO: 188376 - DNA, 13 bp, Unknown
  misc_feature (1)..( 13): Result.005 file - promoters50/4767298
tggcttctatttc

SEQ ID NO: 188377 - DNA, 13 bp, Unknown
  misc_feature (1)..( 13): Result.005 file - promoters50/4767298
tgaattctaaaat

SEQ ID NO: 188378 - DNA, 13 bp, Unknown
  misc_feature (1)..( 13): Result.005 file - promoters50/4767298
tgtcttttatcaa

SEQ ID NO: 188379 - DNA, 8 bp, Unknown
  misc_feature (1)..( 8): Result.005 file - promoters50/4767314
aaaatttt

SEQ ID NO: 188380 - DNA, 8 bp, Unknown
  misc_feature (1)..( 8): Result.005 file - promoters50/4767314
aaaacttt

SEQ ID NO: 188381 - DNA, 9 bp, Unknown
  misc_feature (1)..( 9): Result.005 file - promoters50/4767314
aaacactta

SEQ ID NO: 188382 - DNA, 12 bp, Unknown
  misc_feature (1)..( 12): Result.005 file - promoters50/4767314
tttcaagaaaca

SEQ ID NO: 188383 - DNA, 12 bp, Unknown
  misc_feature (1)..( 12): Result.005 file - promoters50/4767314
ttttaagtgata

SEQ ID NO: 188384 - DNA, 12 bp, Unknown
  misc_feature (1)..( 12): Result.005 file - promoters50/4767314
gtttaaatgata

SEQ ID NO: 188385 - DNA, 9 bp, Unknown
  misc_feature (1)..( 9): Result.005 file - promoters50/4767318
tgttatttc

SEQ ID NO: 188386 - DNA, 9 bp, Unknown
  misc_feature (1)..( 9): Result.005 file - promoters50/4767318
tgtaatttt

SEQ ID NO: 188387 - DNA, 9 bp, Unknown
  misc_feature (1)..( 9): Result.005 file - promoters50/4767318
ccatatttc

SEQ ID NO: 188388 - DNA, 12 bp, Unknown
  misc_feature (1)..( 12): Result.005 file - promoters50/4767318
taacattaatat

SEQ ID NO: 188389 - DNA, 12 bp, Unknown
  misc_feature (1)..( 12): Result.005 file - promoters50/4767318
aatcattaaact

SEQ ID NO: 188390 - DNA, 12 bp, Unknown
  misc_feature (1)..( 12): Result.005 file - promoters50/4767318
taagattaagtt

SEQ ID NO: 188391 - DNA, 12 bp, Unknown
  misc_feature (1)..( 12): Result.005 file - promoters50/4767318
gaatatttatat

SEQ ID NO: 188392 - DNA, 9 bp, Unknown
  misc_feature (1)..( 9): Result.005 file - promoters50/4767318
tttaattag

SEQ ID NO: 188393 - DNA, 9 bp, Unknown
  misc_feature (1)..( 9): Result.005 file - promoters50/4767318
tttacttaa

SEQ ID NO: 188394 - DNA, 9 bp, Unknown
  misc_feature (1)..( 9): Result.005 file - promoters50/4767318
ttttcttaa

SEQ ID NO: 188395 - DNA, 9 bp, Unknown
  misc_feature (1)..( 9): Result.005 file - promoters50/4767318
tttacttca

SEQ ID NO: 188396 - DNA, 10 bp, Unknown
  misc_feature (1)..( 10): Result.005 file - promoters50/4767318
ttaaatacac

SEQ ID NO: 188397 - DNA, 10 bp, Unknown
  misc_feature (1)..( 10): Result.005 file - promoters50/4767318
gaaaacacac

SEQ ID NO: 188398 - DNA, 10 bp, Unknown
  misc_feature (1)..( 10): Result.005 file - promoters50/4767318
aaaaacacaa

SEQ ID NO: 188399 - DNA, 9 bp, Unknown
  misc_feature (1)..( 9): Result.005 file - promoters50/4767318
aaattatca

SEQ ID NO: 188400 - DNA, 9 bp, Unknown
  misc_feature (1)..( 9): Result.005 file - promoters50/4767318
aaaatatta

SEQ ID NO: 188401 - DNA, 9 bp, Unknown
  misc_feature (1)..( 9): Result.005 file - promoters50/4767318
caattttat

SEQ ID NO: 188402 - DNA, 9 bp, Unknown
  misc_feature (1)..( 9): Result.005 file - promoters50/4767318
aaagactga

SEQ ID NO: 188403 - DNA, 9 bp, Unknown
  misc_feature (1)..( 9): Result.005 file - promoters50/4767318
aaatactta

SEQ ID NO: 188404 - DNA, 9 bp, Unknown
  misc_feature (1)..( 9): Result.005 file - promoters50/4767318
gaatattta

SEQ ID NO: 188405 - DNA, 7 bp, Unknown
  misc_feature (1)..( 7): Result.005 file - promoters50/4767318
ttctttt

SEQ ID NO: 188406 - DNA, 7 bp, Unknown
  misc_feature (1)..( 7): Result.005 file - promoters50/4767318
ttcgttt

SEQ ID NO: 188407 - DNA, 7 bp, Unknown
  misc_feature (1)..( 7): Result.005 file - promoters50/4767318
ttcattt

SEQ ID NO: 188408 - DNA, 8 bp, Unknown
  misc_feature (1)..( 8): Result.005 file - promoters50/4767318
acatgatt

SEQ ID NO: 188409 - DNA, 8 bp, Unknown
  misc_feature (1)..( 8): Result.005 file - promoters50/4767318
acaagatt

SEQ ID NO: 188410 - DNA, 8 bp, Unknown
  misc_feature (1)..( 8): Result.005 file - promoters50/4767318
tcaatatt

SEQ ID NO: 188411 - DNA, 10 bp, Unknown
  misc_feature (1)..( 10): Result.005 file - promoters50/4767318
gtcttcatca

SEQ ID NO: 188412 - DNA, 10 bp, Unknown
  misc_feature (1)..( 10): Result.005 file - promoters50/4767318
gtcttcattt

SEQ ID NO: 188413 - DNA, 10 bp, Unknown
  misc_feature (1)..( 10): Result.005 file - promoters50/4767318
ttgttcgttt

SEQ ID NO: 188414 - DNA, 9 bp, Unknown
  misc_feature (1)..( 9): Result.005 file - promoters50/4767318
aaaatcatt

SEQ ID NO: 188415 - DNA, 9 bp, Unknown
  misc_feature (1)..( 9): Result.005 file - promoters50/4767318
aaaattatt

SEQ ID NO: 188416 - DNA, 9 bp, Unknown
  misc_feature (1)..( 9): Result.005 file - promoters50/4767318
taaattatt

SEQ ID NO: 188417 - DNA, 8 bp, Unknown
  misc_feature (1)..( 8): Result.005 file - promoters50/4767330
cgatattt

SEQ ID NO: 188418 - DNA, 8 bp, Unknown
  misc_feature (1)..( 8): Result.005 file - promoters50/4767330
caatattt

SEQ ID NO: 188419 - DNA, 8 bp, Unknown
  misc_feature (1)..( 8): Result.005 file - promoters50/4767330
cgagattc

SEQ ID NO: 188420 - DNA, 8 bp, Unknown
  misc_feature (1)..( 8): Result.005 file - promoters50/4767330
caattttt

SEQ ID NO: 188421 - DNA, 11 bp, Unknown
  misc_feature (1)..( 11): Result.005 file - promoters50/4767330
atttctgtttg

SEQ ID NO: 188422 - DNA, 11 bp, Unknown
  misc_feature (1)..( 11): Result.005 file - promoters50/4767330
atttttgtttg

SEQ ID NO: 188423 - DNA, 11 bp, Unknown
  misc_feature (1)..( 11): Result.005 file - promoters50/4767330
acttgtgtttg

SEQ ID NO: 188424 - DNA, 11 bp, Unknown
  misc_feature (1)..( 11): Result.005 file - promoters50/4767330
aattgtattta

SEQ ID NO: 188425 - DNA, 13 bp, Unknown
  misc_feature (1)..( 13): Result.005 file - promoters50/4767335
acacattcttcaa

SEQ ID NO: 188426 - DNA, 13 bp, Unknown
  misc_feature (1)..( 13): Result.005 file - promoters50/4767335
atgaattctttca

SEQ ID NO: 188427 - DNA, 13 bp, Unknown
  misc_feature (1)..( 13): Result.005 file - promoters50/4767335
aagaattattttg

SEQ ID NO: 188428 - DNA, 14 bp, Unknown
  misc_feature (1)..( 14): Result.005 file - promoters50/4767335
atccattagtttcc

SEQ ID NO: 188429 - DNA, 14 bp, Unknown
  misc_feature (1)..( 14): Result.005 file - promoters50/4767335
tttgcttctttgga

SEQ ID NO: 188430 - DNA, 14 bp, Unknown
  misc_feature (1)..( 14): Result.005 file - promoters50/4767335
atgaaatctctcaa

SEQ ID NO: 188431 - DNA, 9 bp, Unknown
  misc_feature (1)..( 9): Result.005 file - promoters50/4767369
aaataaaga

SEQ ID NO: 188432 - DNA, 9 bp, Unknown
  misc_feature (1)..( 9): Result.005 file - promoters50/4767369
caataaatt

SEQ ID NO: 188433 - DNA, 9 bp, Unknown
  misc_feature (1)..( 9): Result.005 file - promoters50/4767369
caatatatt

SEQ ID NO: 188434 - DNA, 7 bp, Unknown
  misc_feature (1)..( 7): Result.005 file - promoters50/4767377
ttaaaat

SEQ ID NO: 188435 - DNA, 7 bp, Unknown
  misc_feature (1)..( 7): Result.005 file - promoters50/4767377
ttaaaat

SEQ ID NO: 188436 - DNA, 7 bp, Unknown
  misc_feature (1)..( 7): Result.005 file - promoters50/4767377
ttaaaaa

SEQ ID NO: 188437 - DNA, 7 bp, Unknown
  misc_feature (1)..( 7): Result.005 file - promoters50/4767377
ttaaaaa

SEQ ID NO: 188438 - DNA, 12 bp, Unknown
  misc_feature (1)..( 12): Result.005 file - promoters50/4767377
ccgttaaaatag

SEQ ID NO: 188439 - DNA, 12 bp, Unknown
  misc_feature (1)..( 12): Result.005 file - promoters50/4767377
aaattaaaatct

SEQ ID NO: 188440 - DNA, 12 bp, Unknown
  misc_feature (1)..( 12): Result.005 file - promoters50/4767377
tctacaaaataa

SEQ ID NO: 188441 - DNA, 12 bp, Unknown
  misc_feature (1)..( 12): Result.005 file - promoters50/4767377
aaattaaacggg

SEQ ID NO: 188442 - DNA, 12 bp, Unknown
  misc_feature (1)..( 12): Result.005 file - promoters50/4767377
ttgataaactct

SEQ ID NO: 188443 - DNA, 9 bp, Unknown
  misc_feature (1)..( 9): Result.005 file - promoters50/4767377
ttaaaccat

SEQ ID NO: 188444 - DNA, 9 bp, Unknown
  misc_feature (1)..( 9): Result.005 file - promoters50/4767377
ataaaccta

SEQ ID NO: 188445 - DNA, 9 bp, Unknown
  misc_feature (1)..( 9): Result.005 file - promoters50/4767377
aaaaaccat

SEQ ID NO: 188446 - DNA, 9 bp, Unknown
  misc_feature (1)..( 9): Result.005 file - promoters50/4767377
ataaactct

SEQ ID NO: 188447 - DNA, 7 bp, Unknown
  misc_feature (1)..( 7): Result.005 file - promoters50/4767377
aaataac

SEQ ID NO: 188448 - DNA, 7 bp, Unknown
  misc_feature (1)..( 7): Result.005 file - promoters50/4767377
aaataaa

SEQ ID NO: 188449 - DNA, 7 bp, Unknown
  misc_feature (1)..( 7): Result.005 file - promoters50/4767377
aaataat

SEQ ID NO: 188450 - DNA, 8 bp, Unknown
  misc_feature (1)..( 8): Result.005 file - promoters50/4767377
aagatata

SEQ ID NO: 188451 - DNA, 7 bp, Unknown
  misc_feature (1)..( 7): Result.005 file - promoters50/4767377
caaataa

SEQ ID NO: 188452 - DNA, 7 bp, Unknown
  misc_feature (1)..( 7): Result.005 file - promoters50/4767377
gaaataa

SEQ ID NO: 188453 - DNA, 7 bp, Unknown
  misc_feature (1)..( 7): Result.005 file - promoters50/4767377
gaaataa

SEQ ID NO: 188454 - DNA, 7 bp, Unknown
  misc_feature (1)..( 7): Result.005 file - promoters50/4767377
gaaataa

SEQ ID NO: 188455 - DNA, 11 bp, Unknown
  misc_feature (1)..( 11): Result.005 file - promoters50/4767377
ttaaaatcaac

SEQ ID NO: 188456 - DNA, 11 bp, Unknown
  misc_feature (1)..( 11): Result.005 file - promoters50/4767377
ttaaaaatata

SEQ ID NO: 188457 - DNA, 12 bp, Unknown
  misc_feature (1)..( 12): Result.005 file - promoters50/4767377
ttataaataatt

SEQ ID NO: 188458 - DNA, 12 bp, Unknown
  misc_feature (1)..( 12): Result.005 file - promoters50/4767377
tgtgaaataatt

SEQ ID NO: 188459 - DNA, 14 bp, Unknown
  misc_feature (1)..( 14): Result.005 file - promoters50/4767379
ttcgtttgatatat

SEQ ID NO: 188460 - DNA, 14 bp, Unknown
  misc_feature (1)..( 14): Result.005 file - promoters50/4767379
aaccaatgatattc

SEQ ID NO: 188461 - DNA, 14 bp, Unknown
  misc_feature (1)..( 14): Result.005 file - promoters50/4767379
taacattgatataa

SEQ ID NO: 188462 - DNA, 14 bp, Unknown
  misc_feature (1)..( 14): Result.005 file - promoters50/4767379
gtttaatgaaattc

SEQ ID NO: 188463 - DNA, 14 bp, Unknown
  misc_feature (1)..( 14): Result.005 file - promoters50/4767379
taaaattaatattt

SEQ ID NO: 188464 - DNA, 14 bp, Unknown
  misc_feature (1)..( 14): Result.005 file - promoters50/4767379
caaaaataacagat

SEQ ID NO: 188465 - DNA, 14 bp, Unknown
  misc_feature (1)..( 14): Result.005 file - promoters50/4767379
ccaaaatgaaaaac

SEQ ID NO: 188466 - DNA, 9 bp, Unknown
  misc_feature (1)..( 9): Result.005 file - promoters50/4767379
atacatata

SEQ ID NO: 188467 - DNA, 9 bp, Unknown
  misc_feature (1)..( 9): Result.005 file - promoters50/4767379
gtacacata

SEQ ID NO: 188468 - DNA, 9 bp, Unknown
  misc_feature (1)..( 9): Result.005 file - promoters50/4767379
ataaataaa

SEQ ID NO: 188469 - DNA, 9 bp, Unknown
  misc_feature (1)..( 9): Result.005 file - promoters50/4767379
aaaaacaaa

SEQ ID NO: 188470 - DNA, 9 bp, Unknown
  misc_feature (1)..( 9): Result.005 file - promoters50/4767379
ttaaaaaaa

SEQ ID NO: 188471 - DNA, 9 bp, Unknown
  misc_feature (1)..( 9): Result.005 file - promoters50/4767379
tgaaaaaaa

SEQ ID NO: 188472 - DNA, 14 bp, Unknown
  misc_feature (1)..( 14): Result.005 file - promoters50/4767379
atactgtatgttta

SEQ ID NO: 188473 - DNA, 14 bp, Unknown
  misc_feature (1)..( 14): Result.005 file - promoters50/4767379
caaacaaatgtttg

SEQ ID NO: 188474 - DNA, 14 bp, Unknown
  misc_feature (1)..( 14): Result.005 file - promoters50/4767379
gaaaagaatgatta

SEQ ID NO: 188475 - DNA, 14 bp, Unknown
  misc_feature (1)..( 14): Result.005 file - promoters50/4767379
taaataaatttttg

SEQ ID NO: 188476 - DNA, 14 bp, Unknown
  misc_feature (1)..( 14): Result.005 file - promoters50/4767379
aaaacaaacgtgga

SEQ ID NO: 188477 - DNA, 14 bp, Unknown
  misc_feature (1)..( 14): Result.005 file - promoters50/4767379
taaaaaaagaagaa

SEQ ID NO: 188478 - DNA, 14 bp, Unknown
  misc_feature (1)..( 14): Result.005 file - promoters50/4767379
ttgatttctttttg

SEQ ID NO: 188479 - DNA, 10 bp, Unknown
  misc_feature (1)..( 10): Result.005 file - promoters50/4767379
ttaagaaaag

SEQ ID NO: 188480 - DNA, 10 bp, Unknown
  misc_feature (1)..( 10): Result.005 file - promoters50/4767379
agtagagaag

SEQ ID NO: 188481 - DNA, 10 bp, Unknown
  misc_feature (1)..( 10): Result.005 file - promoters50/4767379
ttaaaaaaag

SEQ ID NO: 188482 - DNA, 10 bp, Unknown
  misc_feature (1)..( 10): Result.005 file - promoters50/4767379
gtcaaacaaa

SEQ ID NO: 188483 - DNA, 10 bp, Unknown
  misc_feature (1)..( 10): Result.005 file - promoters50/4767379
tgaaaaaaaa

SEQ ID NO: 188484 - DNA, 10 bp, Unknown
  misc_feature (1)..( 10): Result.005 file - promoters50/4767379
gctaaccaat

SEQ ID NO: 188485 - DNA, 10 bp, Unknown
  misc_feature (1)..( 10): Result.005 file - promoters50/4767379
ataaataaat

SEQ ID NO: 188486 - DNA, 10 bp, Unknown
  misc_feature (1)..( 10): Result.005 file - promoters50/4767379
caaaatgaaa

SEQ ID NO: 188487 - DNA, 11 bp, Unknown
  misc_feature (1)..( 11): Result.005 file - promoters50/4767379
ataatgttaac

SEQ ID NO: 188488 - DNA, 11 bp, Unknown
  misc_feature (1)..( 11): Result.005 file - promoters50/4767379
atagtgtacgg

SEQ ID NO: 188489 - DNA, 11 bp, Unknown
  misc_feature (1)..( 11): Result.005 file - promoters50/4767379
taaattttaat

SEQ ID NO: 188490 - DNA, 11 bp, Unknown
  misc_feature (1)..( 11): Result.005 file - promoters50/4767379
agaatgtcaac

SEQ ID NO: 188491 - DNA, 11 bp, Unknown
  misc_feature (1)..( 11): Result.005 file - promoters50/4767379
ttaattttttc

SEQ ID NO: 188492 - DNA, 11 bp, Unknown
  misc_feature (1)..( 11): Result.005 file - promoters50/4767379
tcaatcaaaaa

SEQ ID NO: 188493 - DNA, 11 bp, Unknown
  misc_feature (1)..( 11): Result.005 file - promoters50/4767379
tctgtttcaca

SEQ ID NO: 188494 - DNA, 11 bp, Unknown
  misc_feature (1)..( 11): Result.005 file - promoters50/4767379
tctttttattt

SEQ ID NO: 188495 - DNA, 11 bp, Unknown
  misc_feature (1)..( 11): Result.005 file - promoters50/4767379
tttgtttaaca

SEQ ID NO: 188496 - DNA, 11 bp, Unknown
  misc_feature (1)..( 11): Result.005 file - promoters50/4767379
tttgtttctgg

SEQ ID NO: 188497 - DNA, 11 bp, Unknown
  misc_feature (1)..( 11): Result.005 file - promoters50/4767379
acggtttaagc

SEQ ID NO: 188498 - DNA, 11 bp, Unknown
  misc_feature (1)..( 11): Result.005 file - promoters50/4767379
taggtttaaga

SEQ ID NO: 188499 - DNA, 12 bp, Unknown
  misc_feature (1)..( 12): Result.005 file - promoters50/4767379
atacattgtagg

SEQ ID NO: 188500 - DNA, 12 bp, Unknown
  misc_feature (1)..( 12): Result.005 file - promoters50/4767379
taacattgatat

SEQ ID NO: 188501 - DNA, 12 bp, Unknown
  misc_feature (1)..( 12): Result.005 file - promoters50/4767379
taatatttcatt

SEQ ID NO: 188502 - DNA, 12 bp, Unknown
  misc_feature (1)..( 12): Result.005 file - promoters50/4767379
taaaattaatat

SEQ ID NO: 188503 - DNA, 12 bp, Unknown
  misc_feature (1)..( 12): Result.005 file - promoters50/4767379
caaaaataacag

SEQ ID NO: 188504 - DNA, 12 bp, Unknown
  misc_feature (1)..( 12): Result.005 file - promoters50/4767379
gaaaaataaata

SEQ ID NO: 188505 - DNA, 9 bp, Unknown
  misc_feature (1)..( 9): Result.005 file - promoters50/4767379
taaaatttc

SEQ ID NO: 188506 - DNA, 9 bp, Unknown
  misc_feature (1)..( 9): Result.005 file - promoters50/4767379
taaaatttc

SEQ ID NO: 188507 - DNA, 9 bp, Unknown
  misc_feature (1)..( 9): Result.005 file - promoters50/4767379
aaaaattaa

SEQ ID NO: 188508 - DNA, 9 bp, Unknown
  misc_feature (1)..( 9): Result.005 file - promoters50/4767379
caaaattaa

SEQ ID NO: 188509 - DNA, 10 bp, Unknown
  misc_feature (1)..( 10): Result.005 file - promoters50/4767379
aaaatattaa

SEQ ID NO: 188510 - DNA, 10 bp, Unknown
  misc_feature (1)..( 10): Result.005 file - promoters50/4767379
taacaattct

SEQ ID NO: 188511 - DNA, 10 bp, Unknown
  misc_feature (1)..( 10): Result.005 file - promoters50/4767379
ggagataata

SEQ ID NO: 188512 - DNA, 10 bp, Unknown
  misc_feature (1)..( 10): Result.005 file - promoters50/4767379
aaagaaaatt

SEQ ID NO: 188513 - DNA, 10 bp, Unknown
  misc_feature (1)..( 10): Result.005 file - promoters50/4767379
caataaaatt

SEQ ID NO: 188514 - DNA, 10 bp, Unknown
  misc_feature (1)..( 10): Result.005 file - promoters50/4767379
aaataaataa

SEQ ID NO: 188515 - DNA, 10 bp, Unknown
  misc_feature (1)..( 10): Result.005 file - promoters50/4767379
ttataaaata

SEQ ID NO: 188516 - DNA, 10 bp, Unknown
  misc_feature (1)..( 10): Result.005 file - promoters50/4767379
caaaaaaata

SEQ ID NO: 188517 - DNA, 10 bp, Unknown
  misc_feature (1)..( 10): Result.005 file - promoters50/4767379
aaaaataaca

SEQ ID NO: 188518 - DNA, 7 bp, Unknown
  misc_feature (1)..( 7): Result.005 file - promoters50/4767379
aaacaaa

SEQ ID NO: 188519 - DNA, 7 bp, Unknown
  misc_feature (1)..( 7): Result.005 file - promoters50/4767379
aaacaaa

SEQ ID NO: 188520 - DNA, 7 bp, Unknown
  misc_feature (1)..( 7): Result.005 file - promoters50/4767379
aaaaaaa

SEQ ID NO: 188521 - DNA, 7 bp, Unknown
  misc_feature (1)..( 7): Result.005 file - promoters50/4767379
aaaaaaa

SEQ ID NO: 188522 - DNA, 7 bp, Unknown
  misc_feature (1)..( 7): Result.005 file - promoters50/4767379
aaccaat

SEQ ID NO: 188523 - DNA, 7 bp, Unknown
  misc_feature (1)..( 7): Result.005 file - promoters50/4767379
aaataaa

SEQ ID NO: 188524 - DNA, 11 bp, Unknown
  misc_feature (1)..( 11): Result.005 file - promoters50/4767379
ccgttaaaaat

SEQ ID NO: 188525 - DNA, 11 bp, Unknown
  misc_feature (1)..( 11): Result.005 file - promoters50/4767379
aaattaaaatc

SEQ ID NO: 188526 - DNA, 11 bp, Unknown
  misc_feature (1)..( 11): Result.005 file - promoters50/4767379
actataaaaaa

SEQ ID NO: 188527 - DNA, 11 bp, Unknown
  misc_feature (1)..( 11): Result.005 file - promoters50/4767379
atcataaaatc

SEQ ID NO: 188528 - DNA, 11 bp, Unknown
  misc_feature (1)..( 11): Result.005 file - promoters50/4767379
tcattaaattc

SEQ ID NO: 188529 - DNA, 11 bp, Unknown
  misc_feature (1)..( 11): Result.005 file - promoters50/4767379
cccagaaaaaa

SEQ ID NO: 188530 - DNA, 12 bp, Unknown
  misc_feature (1)..( 12): Result.005 file - promoters50/4767379
tcaaacatataa

SEQ ID NO: 188531 - DNA, 12 bp, Unknown
  misc_feature (1)..( 12): Result.005 file - promoters50/4767379
tcaaacaataaa

SEQ ID NO: 188532 - DNA, 12 bp, Unknown
  misc_feature (1)..( 12): Result.005 file - promoters50/4767379
cgaaaaataaat

SEQ ID NO: 188533 - DNA, 12 bp, Unknown
  misc_feature (1)..( 12): Result.005 file - promoters50/4767379
aaaaaaatataa

SEQ ID NO: 188534 - DNA, 12 bp, Unknown
  misc_feature (1)..( 12): Result.005 file - promoters50/4767379
tcaaaaataaca

SEQ ID NO: 188535 - DNA, 12 bp, Unknown
  misc_feature (1)..( 12): Result.005 file - promoters50/4767379
tataaaatacag

SEQ ID NO: 188536 - DNA, 8 bp, Unknown
  misc_feature (1)..( 8): Result.005 file - promoters50/4767395
atcaatgt

SEQ ID NO: 188537 - DNA, 8 bp, Unknown
  misc_feature (1)..( 8): Result.005 file - promoters50/4767395
atcaataa

SEQ ID NO: 188538 - DNA, 8 bp, Unknown
  misc_feature (1)..( 8): Result.005 file - promoters50/4767395
ttcaataa

SEQ ID NO: 188539 - DNA, 7 bp, Unknown
  misc_feature (1)..( 7): Result.005 file - promoters50/4767410
tatgaaa

SEQ ID NO: 188540 - DNA, 7 bp, Unknown
  misc_feature (1)..( 7): Result.005 file - promoters50/4767410
tatgaaa

SEQ ID NO: 188541 - DNA, 7 bp, Unknown
  misc_feature (1)..( 7): Result.005 file - promoters50/4767410
tattaaa

SEQ ID NO: 188542 - DNA, 8 bp, Unknown
  misc_feature (1)..( 8): Result.005 file - promoters50/4767410
agttaaag

SEQ ID NO: 188543 - DNA, 8 bp, Unknown
  misc_feature (1)..( 8): Result.005 file - promoters50/4767410
tgttaaag

SEQ ID NO: 188544 - DNA, 8 bp, Unknown
  misc_feature (1)..( 8): Result.005 file - promoters50/4767410
agtaaaaa

SEQ ID NO: 188545 - DNA, 9 bp, Unknown
  misc_feature (1)..( 9): Result.005 file - promoters50/4767410
ggttttgtt

SEQ ID NO: 188546 - DNA, 9 bp, Unknown
  misc_feature (1)..( 9): Result.005 file - promoters50/4767410
ggatttgtt

SEQ ID NO: 188547 - DNA, 9 bp, Unknown
  misc_feature (1)..( 9): Result.005 file - promoters50/4767410
ggacttgtg

SEQ ID NO: 188548 - DNA, 12 bp, Unknown
  misc_feature (1)..( 12): Result.005 file - promoters50/4767452
caaaaacctctg

SEQ ID NO: 188549 - DNA, 12 bp, Unknown
  misc_feature (1)..( 12): Result.005 file - promoters50/4767452
caaaaagacggc

SEQ ID NO: 188550 - DNA, 12 bp, Unknown
  misc_feature (1)..( 12): Result.005 file - promoters50/4767452
aaaaaaaaaaaa

SEQ ID NO: 188551 - DNA, 12 bp, Unknown
  misc_feature (1)..( 12): Result.005 file - promoters50/4767452
gaaaaagatatg

SEQ ID NO: 188552 - DNA, 10 bp, Unknown
  misc_feature (1)..( 10): Result.005 file - promoters50/4767487
attaattttt

SEQ ID NO: 188553 - DNA, 10 bp, Unknown
  misc_feature (1)..( 10): Result.005 file - promoters50/4767487
cataaatttg

SEQ ID NO: 188554 - DNA, 10 bp, Unknown
  misc_feature (1)..( 10): Result.005 file - promoters50/4767487
gttaattgtc

SEQ ID NO: 188555 - DNA, 10 bp, Unknown
  misc_feature (1)..( 10): Result.005 file - promoters50/4767487
atttatttat

SEQ ID NO: 188556 - DNA, 10 bp, Unknown
  misc_feature (1)..( 10): Result.005 file - promoters50/4767487
atatatttaa

SEQ ID NO: 188557 - DNA, 10 bp, Unknown
  misc_feature (1)..( 10): Result.005 file - promoters50/4767487
ccaaaattga

SEQ ID NO: 188558 - DNA, 10 bp, Unknown
  misc_feature (1)..( 10): Result.005 file - promoters50/4767487
atatatgtaa

SEQ ID NO: 188559 - DNA, 10 bp, Unknown
  misc_feature (1)..( 10): Result.005 file - promoters50/4767487
ccattttaga

SEQ ID NO: 188560 - DNA, 10 bp, Unknown
  misc_feature (1)..( 10): Result.005 file - promoters50/4767487
ctattttatt

SEQ ID NO: 188561 - DNA, 10 bp, Unknown
  misc_feature (1)..( 10): Result.005 file - promoters50/4767487
gcattttctt

SEQ ID NO: 188562 - DNA, 10 bp, Unknown
  misc_feature (1)..( 10): Result.005 file - promoters50/4767487
tttttttagt

SEQ ID NO: 188563 - DNA, 10 bp, Unknown
  misc_feature (1)..( 10): Result.005 file - promoters50/4767487
ccattttccc

SEQ ID NO: 188564 - DNA, 10 bp, Unknown
  misc_feature (1)..( 10): Result.005 file - promoters50/4767487
aaatttaatt

SEQ ID NO: 188565 - DNA, 10 bp, Unknown
  misc_feature (1)..( 10): Result.005 file - promoters50/4767490
acaagattaa

SEQ ID NO: 188566 - DNA, 10 bp, Unknown
  misc_feature (1)..( 10): Result.005 file - promoters50/4767490
taaagtttaa

SEQ ID NO: 188567 - DNA, 10 bp, Unknown
  misc_feature (1)..( 10): Result.005 file - promoters50/4767490
taaacttttt

SEQ ID NO: 188568 - DNA, 10 bp, Unknown
  misc_feature (1)..( 10): Result.005 file - promoters50/4767490
taaatttttt

SEQ ID NO: 188569 - DNA, 13 bp, Unknown
  misc_feature (1)..( 13): Result.005 file - promoters50/4767490
agtcatatttatt

SEQ ID NO: 188570 - DNA, 13 bp, Unknown
  misc_feature (1)..( 13): Result.005 file - promoters50/4767490
actcatatttgaa

SEQ ID NO: 188571 - DNA, 13 bp, Unknown
  misc_feature (1)..( 13): Result.005 file - promoters50/4767490
tcaaatatatatt

SEQ ID NO: 188572 - DNA, 13 bp, Unknown
  misc_feature (1)..( 13): Result.005 file - promoters50/4767490
agtgataaaagaa

SEQ ID NO: 188573 - DNA, 11 bp, Unknown
  misc_feature (1)..( 11): Result.005 file - promoters50/4767490
ctggttttgaa

SEQ ID NO: 188574 - DNA, 11 bp, Unknown
  misc_feature (1)..( 11): Result.005 file - promoters50/4767490
ccggttttttt

SEQ ID NO: 188575 - DNA, 11 bp, Unknown
  misc_feature (1)..( 11): Result.005 file - promoters50/4767490
attgttttttt

SEQ ID NO: 188576 - DNA, 11 bp, Unknown
  misc_feature (1)..( 11): Result.005 file - promoters50/4767490
tgtgtttttaa

SEQ ID NO: 188577 - DNA, 10 bp, Unknown
  misc_feature (1)..( 10): Result.005 file - promoters50/4767490
ttttgaaaaa

SEQ ID NO: 188578 - DNA, 10 bp, Unknown
  misc_feature (1)..( 10): Result.005 file - promoters50/4767490
ttttgacact

SEQ ID NO: 188579 - DNA, 10 bp, Unknown
  misc_feature (1)..( 10): Result.005 file - promoters50/4767490
ttttgaaact

SEQ ID NO: 188580 - DNA, 10 bp, Unknown
  misc_feature (1)..( 10): Result.005 file - promoters50/4767490
atttaacact

SEQ ID NO: 188581 - DNA, 6 bp, Unknown
  misc_feature (1)..( 6): Result.005 file - promoters50/4767509
atcaac

SEQ ID NO: 188582 - DNA, 6 bp, Unknown
  misc_feature (1)..( 6): Result.005 file - promoters50/4767509
atcaac

SEQ ID NO: 188583 - DNA, 6 bp, Unknown
  misc_feature (1)..( 6): Result.005 file - promoters50/4767509
atcaac

SEQ ID NO: 188584 - DNA, 11 bp, Unknown
  misc_feature (1)..( 11): Result.005 file - promoters50/4767509
tcaaatatata

SEQ ID NO: 188585 - DNA, 11 bp, Unknown
  misc_feature (1)..( 11): Result.005 file - promoters50/4767509
tataatataat

SEQ ID NO: 188586 - DNA, 11 bp, Unknown
  misc_feature (1)..( 11): Result.005 file - promoters50/4767509
tatcatataat

SEQ ID NO: 188587 - DNA, 11 bp, Unknown
  misc_feature (1)..( 11): Result.005 file - promoters50/4767515
tttgatttttg

SEQ ID NO: 188588 - DNA, 11 bp, Unknown
  misc_feature (1)..( 11): Result.005 file - promoters50/4767515
attgattgcta

SEQ ID NO: 188589 - DNA, 12 bp, Unknown
  misc_feature (1)..( 12): Result.005 file - promoters50/4767515
tgctgatgtttg

SEQ ID NO: 188590 - DNA, 12 bp, Unknown
  misc_feature (1)..( 12): Result.005 file - promoters50/4767515
gttggatagctt

SEQ ID NO: 188591 - DNA, 12 bp, Unknown
  misc_feature (1)..( 12): Result.005 file - promoters50/4767515
tggcgcttatga

SEQ ID NO: 188592 - DNA, 12 bp, Unknown
  misc_feature (1)..( 12): Result.005 file - promoters50/4767515
tcgagatgggaa

SEQ ID NO: 188593 - DNA, 13 bp, Unknown
  misc_feature (1)..( 13): Result.005 file - promoters50/4767515
tcaactaaacaag

SEQ ID NO: 188594 - DNA, 13 bp, Unknown
  misc_feature (1)..( 13): Result.005 file - promoters50/4767515
ttaacaaaacaat

SEQ ID NO: 188595 - DNA, 13 bp, Unknown
  misc_feature (1)..( 13): Result.005 file - promoters50/4767515
tttttaaaacacc

SEQ ID NO: 188596 - DNA, 13 bp, Unknown
  misc_feature (1)..( 13): Result.005 file - promoters50/4767515
atctcaaaatacc

SEQ ID NO: 188597 - DNA, 13 bp, Unknown
  misc_feature (1)..( 13): Result.005 file - promoters50/4767515
tgaacaaatatat

SEQ ID NO: 188598 - DNA, 13 bp, Unknown
  misc_feature (1)..( 13): Result.005 file - promoters50/4767515
ttatcaatgggat

SEQ ID NO: 188599 - DNA, 13 bp, Unknown
  misc_feature (1)..( 13): Result.005 file - promoters50/4767515
gattatcaataat

SEQ ID NO: 188600 - DNA, 13 bp, Unknown
  misc_feature (1)..( 13): Result.005 file - promoters50/4767515
ctatttcaaaaat

SEQ ID NO: 188601 - DNA, 13 bp, Unknown
  misc_feature (1)..( 13): Result.005 file - promoters50/4767515
tcgtatcataaag

SEQ ID NO: 188602 - DNA, 13 bp, Unknown
  misc_feature (1)..( 13): Result.005 file - promoters50/4767515
agaaaaaaaaaat

SEQ ID NO: 188603 - DNA, 13 bp, Unknown
  misc_feature (1)..( 13): Result.005 file - promoters50/4767515
tatatataaaaat

SEQ ID NO: 188604 - DNA, 13 bp, Unknown
  misc_feature (1)..( 13): Result.005 file - promoters50/4767515
ctagttcaaagat

SEQ ID NO: 188605 - DNA, 7 bp, Unknown
  misc_feature (1)..( 7): Result.005 file - promoters50/4767519
aagttat

SEQ ID NO: 188606 - DNA, 7 bp, Unknown
  misc_feature (1)..( 7): Result.005 file - promoters50/4767519
aagatat

SEQ ID NO: 188607 - DNA, 7 bp, Unknown
  misc_feature (1)..( 7): Result.005 file - promoters50/4767519
gatttat

SEQ ID NO: 188608 - DNA, 11 bp, Unknown
  misc_feature (1)..( 11): Result.005 file - promoters50/4767519
ttaggtatatg

SEQ ID NO: 188609 - DNA, 11 bp, Unknown
  misc_feature (1)..( 11): Result.005 file - promoters50/4767519
ataattatatg

SEQ ID NO: 188610 - DNA, 11 bp, Unknown
  misc_feature (1)..( 11): Result.005 file - promoters50/4767519
ataattttata

SEQ ID NO: 188611 - DNA, 7 bp, Unknown
  misc_feature (1)..( 7): Result.005 file - promoters50/4767519
tagaaac

SEQ ID NO: 188612 - DNA, 7 bp, Unknown
  misc_feature (1)..( 7): Result.005 file - promoters50/4767519
tagaaac

SEQ ID NO: 188613 - DNA, 7 bp, Unknown
  misc_feature (1)..( 7): Result.005 file - promoters50/4767519
aagaaac

SEQ ID NO: 188614 - DNA, 7 bp, Unknown
  misc_feature (1)..( 7): Result.005 file - promoters50/4767519
aaataaa

SEQ ID NO: 188615 - DNA, 7 bp, Unknown
  misc_feature (1)..( 7): Result.005 file - promoters50/4767519
aaataat

SEQ ID NO: 188616 - DNA, 7 bp, Unknown
  misc_feature (1)..( 7): Result.005 file - promoters50/4767519
aaataaa

SEQ ID NO: 188617 - DNA, 7 bp, Unknown
  misc_feature (1)..( 7): Result.005 file - promoters50/4767519
aaaaatt

SEQ ID NO: 188618 - DNA, 7 bp, Unknown
  misc_feature (1)..( 7): Result.005 file - promoters50/4767519
aaacatt

SEQ ID NO: 188619 - DNA, 8 bp, Unknown
  misc_feature (1)..( 8): Result.005 file - promoters50/4767519
aaatcata

SEQ ID NO: 188620 - DNA, 7 bp, Unknown
  misc_feature (1)..( 7): Result.005 file - promoters50/4767519
cgaaact

SEQ ID NO: 188621 - DNA, 7 bp, Unknown
  misc_feature (1)..( 7): Result.005 file - promoters50/4767519
agaaact

SEQ ID NO: 188622 - DNA, 7 bp, Unknown
  misc_feature (1)..( 7): Result.005 file - promoters50/4767519
agagact

SEQ ID NO: 188623 - DNA, 11 bp, Unknown
  misc_feature (1)..( 11): Result.005 file - promoters50/4767519
aaacactatat

SEQ ID NO: 188624 - DNA, 11 bp, Unknown
  misc_feature (1)..( 11): Result.005 file - promoters50/4767519
taacactttat

SEQ ID NO: 188625 - DNA, 11 bp, Unknown
  misc_feature (1)..( 11): Result.005 file - promoters50/4767519
aaacacacgta

SEQ ID NO: 188626 - DNA, 8 bp, Unknown
  misc_feature (1)..( 8): Result.005 file - promoters50/4767519
atttcaat

SEQ ID NO: 188627 - DNA, 8 bp, Unknown
  misc_feature (1)..( 8): Result.005 file - promoters50/4767519
atttaaat

SEQ ID NO: 188628 - DNA, 8 bp, Unknown
  misc_feature (1)..( 8): Result.005 file - promoters50/4767519
gtttaaat

SEQ ID NO: 188629 - DNA, 10 bp, Unknown
  misc_feature (1)..( 10): Result.005 file - promoters50/4767519
atttaaggtt

SEQ ID NO: 188630 - DNA, 10 bp, Unknown
  misc_feature (1)..( 10): Result.005 file - promoters50/4767519
atttaagaaa

SEQ ID NO: 188631 - DNA, 10 bp, Unknown
  misc_feature (1)..( 10): Result.005 file - promoters50/4767519
ccttaagaaa

SEQ ID NO: 188632 - DNA, 8 bp, Unknown
  misc_feature (1)..( 8): Result.005 file - promoters50/4767519
gtcatttt

SEQ ID NO: 188633 - DNA, 8 bp, Unknown
  misc_feature (1)..( 8): Result.005 file - promoters50/4767519
aacatttt

SEQ ID NO: 188634 - DNA, 8 bp, Unknown
  misc_feature (1)..( 8): Result.005 file - promoters50/4767519
aacacttt

SEQ ID NO: 188635 - DNA, 11 bp, Unknown
  misc_feature (1)..( 11): Result.005 file - promoters50/4767539
cgtctctgcag

SEQ ID NO: 188636 - DNA, 11 bp, Unknown
  misc_feature (1)..( 11): Result.005 file - promoters50/4767539
tatctctgcag

SEQ ID NO: 188637 - DNA, 11 bp, Unknown
  misc_feature (1)..( 11): Result.005 file - promoters50/4767539
actctttgctc

SEQ ID NO: 188638 - DNA, 11 bp, Unknown
  misc_feature (1)..( 11): Result.005 file - promoters50/4767539
gatctctttgg

SEQ ID NO: 188639 - DNA, 11 bp, Unknown
  misc_feature (1)..( 11): Result.005 file - promoters50/4767539
tttcttttttt

SEQ ID NO: 188640 - DNA, 11 bp, Unknown
  misc_feature (1)..( 11): Result.005 file - promoters50/4767539
tatcactgcac

SEQ ID NO: 188641 - DNA, 10 bp, Unknown
  misc_feature (1)..( 10): Result.005 file - promoters50/4767539
aataatactg

SEQ ID NO: 188642 - DNA, 10 bp, Unknown
  misc_feature (1)..( 10): Result.005 file - promoters50/4767539
tttaaaactc

SEQ ID NO: 188643 - DNA, 10 bp, Unknown
  misc_feature (1)..( 10): Result.005 file - promoters50/4767539
tataatagat

SEQ ID NO: 188644 - DNA, 10 bp, Unknown
  misc_feature (1)..( 10): Result.005 file - promoters50/4767539
cttaaatctc

SEQ ID NO: 188645 - DNA, 10 bp, Unknown
  misc_feature (1)..( 10): Result.005 file - promoters50/4767539
tataattttt

SEQ ID NO: 188646 - DNA, 10 bp, Unknown
  misc_feature (1)..( 10): Result.005 file - promoters50/4767539
taaaaatctg

SEQ ID NO: 188647 - DNA, 15 bp, Unknown
  misc_feature (1)..( 15): Result.005 file - promoters50/4767539
tagatcttggttaat

SEQ ID NO: 188648 - DNA, 15 bp, Unknown
  misc_feature (1)..( 15): Result.005 file - promoters50/4767539
gagatctacatgtaa

SEQ ID NO: 188649 - DNA, 15 bp, Unknown
  misc_feature (1)..( 15): Result.005 file - promoters50/4767539
tcgatctatcaccac

SEQ ID NO: 188650 - DNA, 15 bp, Unknown
  misc_feature (1)..( 15): Result.005 file - promoters50/4767539
tcggtcttcctacga

SEQ ID NO: 188651 - DNA, 15 bp, Unknown
  misc_feature (1)..( 15): Result.005 file - promoters50/4767539
atgatatattttagt

SEQ ID NO: 188652 - DNA, 15 bp, Unknown
  misc_feature (1)..( 15): Result.005 file - promoters50/4767539
actgtatttttgagt

SEQ ID NO: 188653 - DNA, 11 bp, Unknown
  misc_feature (1)..( 11): Result.005 file - promoters50/4767545
ctttctttaaa

SEQ ID NO: 188654 - DNA, 11 bp, Unknown
  misc_feature (1)..( 11): Result.005 file - promoters50/4767545
ctttcttcgta

SEQ ID NO: 188655 - DNA, 11 bp, Unknown
  misc_feature (1)..( 11): Result.005 file - promoters50/4767545
ttttcttgaaa

SEQ ID NO: 188656 - DNA, 11 bp, Unknown
  misc_feature (1)..( 11): Result.005 file - promoters50/4767545
cttcctttgat

SEQ ID NO: 188657 - DNA, 10 bp, Unknown
  misc_feature (1)..( 10): Result.005 file - promoters50/4767545
aaaaaataaa

SEQ ID NO: 188658 - DNA, 10 bp, Unknown
  misc_feature (1)..( 10): Result.005 file - promoters50/4767545
ggaaattaaa

SEQ ID NO: 188659 - DNA, 10 bp, Unknown
  misc_feature (1)..( 10): Result.005 file - promoters50/4767545
taaaaatatt

SEQ ID NO: 188660 - DNA, 10 bp, Unknown
  misc_feature (1)..( 10): Result.005 file - promoters50/4767545
taataataat

SEQ ID NO: 188661 - DNA, 10 bp, Unknown
  misc_feature (1)..( 10): Result.005 file - promoters50/4767545
aaataataat

SEQ ID NO: 188662 - DNA, 10 bp, Unknown
  misc_feature (1)..( 10): Result.005 file - promoters50/4767545
aaataaattt

SEQ ID NO: 188663 - DNA, 10 bp, Unknown
  misc_feature (1)..( 10): Result.005 file - promoters50/4767545
taataataat

SEQ ID NO: 188664 - DNA, 10 bp, Unknown
  misc_feature (1)..( 10): Result.005 file - promoters50/4767545
aaataatttt

SEQ ID NO: 188665 - DNA, 13 bp, Unknown
  misc_feature (1)..( 13): Result.005 file - promoters50/4767545
atttataaattta

SEQ ID NO: 188666 - DNA, 13 bp, Unknown
  misc_feature (1)..( 13): Result.005 file - promoters50/4767545
aaaaataatttta

SEQ ID NO: 188667 - DNA, 13 bp, Unknown
  misc_feature (1)..( 13): Result.005 file - promoters50/4767545
aaaactaattaaa

SEQ ID NO: 188668 - DNA, 13 bp, Unknown
  misc_feature (1)..( 13): Result.005 file - promoters50/4767545
aataataataata

SEQ ID NO: 188669 - DNA, 7 bp, Unknown
  misc_feature (1)..( 7): Result.005 file - promoters50/4767552
agagata

SEQ ID NO: 188670 - DNA, 7 bp, Unknown
  misc_feature (1)..( 7): Result.005 file - promoters50/4767552
agaaata

SEQ ID NO: 188671 - DNA, 7 bp, Unknown
  misc_feature (1)..( 7): Result.005 file - promoters50/4767552
agatatt

SEQ ID NO: 188672 - DNA, 9 bp, Unknown
  misc_feature (1)..( 9): Result.005 file - promoters50/4767574
agaatgatt

SEQ ID NO: 188673 - DNA, 9 bp, Unknown
  misc_feature (1)..( 9): Result.005 file - promoters50/4767574
ggaattatt

SEQ ID NO: 188674 - DNA, 9 bp, Unknown
  misc_feature (1)..( 9): Result.005 file - promoters50/4767574
agattgata

SEQ ID NO: 188675 - DNA, 8 bp, Unknown
  misc_feature (1)..( 8): Result.005 file - promoters50/4767574
tgacattg

SEQ ID NO: 188676 - DNA, 8 bp, Unknown
  misc_feature (1)..( 8): Result.005 file - promoters50/4767574
tgatattg

SEQ ID NO: 188677 - DNA, 8 bp, Unknown
  misc_feature (1)..( 8): Result.005 file - promoters50/4767574
gcatattg

SEQ ID NO: 188678 - DNA, 10 bp, Unknown
  misc_feature (1)..( 10): Result.005 file - promoters50/4767574
taacattctt

SEQ ID NO: 188679 - DNA, 10 bp, Unknown
  misc_feature (1)..( 10): Result.005 file - promoters50/4767574
agacaatctt

SEQ ID NO: 188680 - DNA, 10 bp, Unknown
  misc_feature (1)..( 10): Result.005 file - promoters50/4767574
agaaaatatc

SEQ ID NO: 188681 - DNA, 8 bp, Unknown
  misc_feature (1)..( 8): Result.005 file - promoters50/4767574
ggatttaa

SEQ ID NO: 188682 - DNA, 8 bp, Unknown
  misc_feature (1)..( 8): Result.005 file - promoters50/4767574
agatataa

SEQ ID NO: 188683 - DNA, 8 bp, Unknown
  misc_feature (1)..( 8): Result.005 file - promoters50/4767574
agatatga

SEQ ID NO: 188684 - DNA, 11 bp, Unknown
  misc_feature (1)..( 11): Result.005 file - promoters50/4767574
ttgctgtagaa

SEQ ID NO: 188685 - DNA, 11 bp, Unknown
  misc_feature (1)..( 11): Result.005 file - promoters50/4767574
ttgatgtaggg

SEQ ID NO: 188686 - DNA, 11 bp, Unknown
  misc_feature (1)..( 11): Result.005 file - promoters50/4767574
tatttgtagct

SEQ ID NO: 188687 - DNA, 10 bp, Unknown
  misc_feature (1)..( 10): Result.005 file - promoters50/4767578
gattttatct

SEQ ID NO: 188688 - DNA, 10 bp, Unknown
  misc_feature (1)..( 10): Result.005 file - promoters50/4767578
taatttatct

SEQ ID NO: 188689 - DNA, 10 bp, Unknown
  misc_feature (1)..( 10): Result.005 file - promoters50/4767578
taatgtatac

SEQ ID NO: 188690 - DNA, 11 bp, Unknown
  misc_feature (1)..( 11): Result.005 file - promoters50/4767578
aacaaaataca

SEQ ID NO: 188691 - DNA, 11 bp, Unknown
  misc_feature (1)..( 11): Result.005 file - promoters50/4767578
aacaaaatgta

SEQ ID NO: 188692 - DNA, 11 bp, Unknown
  misc_feature (1)..( 11): Result.005 file - promoters50/4767578
atgtaaattgt

SEQ ID NO: 188693 - DNA, 10 bp, Unknown
  misc_feature (1)..( 10): Result.005 file - promoters50/4767586
aaagttaatt

SEQ ID NO: 188694 - DNA, 10 bp, Unknown
  misc_feature (1)..( 10): Result.005 file - promoters50/4767586
aaatttaata

SEQ ID NO: 188695 - DNA, 10 bp, Unknown
  misc_feature (1)..( 10): Result.005 file - promoters50/4767586
tatttttata

SEQ ID NO: 188696 - DNA, 6 bp, Unknown
  misc_feature (1)..( 6): Result.005 file - promoters50/4767586
atataa

SEQ ID NO: 188697 - DNA, 6 bp, Unknown
  misc_feature (1)..( 6): Result.005 file - promoters50/4767586
atataa

SEQ ID NO: 188698 - DNA, 6 bp, Unknown
  misc_feature (1)..( 6): Result.005 file - promoters50/4767586
atataa

SEQ ID NO: 188699 - DNA, 7 bp, Unknown
  misc_feature (1)..( 7): Result.005 file - promoters50/4767588
ttggttc

SEQ ID NO: 188700 - DNA, 7 bp, Unknown
  misc_feature (1)..( 7): Result.005 file - promoters50/4767588
ttgtttc

SEQ ID NO: 188701 - DNA, 7 bp, Unknown
  misc_feature (1)..( 7): Result.005 file - promoters50/4767588
ttgtttg

SEQ ID NO: 188702 - DNA, 8 bp, Unknown
  misc_feature (1)..( 8): Result.005 file - promoters50/4767610
tattttaa

SEQ ID NO: 188703 - DNA, 8 bp, Unknown
  misc_feature (1)..( 8): Result.005 file - promoters50/4767610
tattttat

SEQ ID NO: 188704 - DNA, 8 bp, Unknown
  misc_feature (1)..( 8): Result.005 file - promoters50/4767610
tatcttaa

SEQ ID NO: 188705 - DNA, 8 bp, Unknown
  misc_feature (1)..( 8): Result.005 file - promoters50/4767610
cttaatta

SEQ ID NO: 188706 - DNA, 8 bp, Unknown
  misc_feature (1)..( 8): Result.005 file - promoters50/4767610
cttgattt

SEQ ID NO: 188707 - DNA, 8 bp, Unknown
  misc_feature (1)..( 8): Result.005 file - promoters50/4767610
ataaatat

SEQ ID NO: 188708 - DNA, 8 bp, Unknown
  misc_feature (1)..( 8): Result.005 file - promoters50/4767617
attcaatt

SEQ ID NO: 188709 - DNA, 8 bp, Unknown
  misc_feature (1)..( 8): Result.005 file - promoters50/4767617
attaaata

SEQ ID NO: 188710 - DNA, 8 bp, Unknown
  misc_feature (1)..( 8): Result.005 file - promoters50/4767617
attacata

SEQ ID NO: 188711 - DNA, 10 bp, Unknown
  misc_feature (1)..( 10): Result.005 file - promoters50/4767638
attttttaat

SEQ ID NO: 188712 - DNA, 10 bp, Unknown
  misc_feature (1)..( 10): Result.005 file - promoters50/4767638
ttttgttatt

SEQ ID NO: 188713 - DNA, 10 bp, Unknown
  misc_feature (1)..( 10): Result.005 file - promoters50/4767638
attctttctt

SEQ ID NO: 188714 - DNA, 10 bp, Unknown
  misc_feature (1)..( 10): Result.005 file - promoters50/4767638
atttttttaa

SEQ ID NO: 188715 - DNA, 10 bp, Unknown
  misc_feature (1)..( 10): Result.005 file - promoters50/4767638
tttctttaac

SEQ ID NO: 188716 - DNA, 10 bp, Unknown
  misc_feature (1)..( 10): Result.005 file - promoters50/4767638
tttctttctt

SEQ ID NO: 188717 - DNA, 11 bp, Unknown
  misc_feature (1)..( 11): Result.005 file - promoters50/4767638
gttatgattga

SEQ ID NO: 188718 - DNA, 11 bp, Unknown
  misc_feature (1)..( 11): Result.005 file - promoters50/4767638
gttatgataaa

SEQ ID NO: 188719 - DNA, 11 bp, Unknown
  misc_feature (1)..( 11): Result.005 file - promoters50/4767638
attataattag

SEQ ID NO: 188720 - DNA, 11 bp, Unknown
  misc_feature (1)..( 11): Result.005 file - promoters50/4767638
ctcataaatag

SEQ ID NO: 188721 - DNA, 11 bp, Unknown
  misc_feature (1)..( 11): Result.005 file - promoters50/4767638
atcataaataa

SEQ ID NO: 188722 - DNA, 11 bp, Unknown
  misc_feature (1)..( 11): Result.005 file - promoters50/4767638
tagataattaa

SEQ ID NO: 188723 - DNA, 10 bp, Unknown
  misc_feature (1)..( 10): Result.005 file - promoters50/4767638
aataaaaaaa

SEQ ID NO: 188724 - DNA, 10 bp, Unknown
  misc_feature (1)..( 10): Result.005 file - promoters50/4767638
gataaaatac

SEQ ID NO: 188725 - DNA, 10 bp, Unknown
  misc_feature (1)..( 10): Result.005 file - promoters50/4767638
agtaaaaaaa

SEQ ID NO: 188726 - DNA, 10 bp, Unknown
  misc_feature (1)..( 10): Result.005 file - promoters50/4767638
aataaaacat

SEQ ID NO: 188727 - DNA, 10 bp, Unknown
  misc_feature (1)..( 10): Result.005 file - promoters50/4767638
aataaaaaaa

SEQ ID NO: 188728 - DNA, 11 bp, Unknown
  misc_feature (1)..( 11): Result.005 file - promoters50/4767663
ataataagtaa

SEQ ID NO: 188729 - DNA, 11 bp, Unknown
  misc_feature (1)..( 11): Result.005 file - promoters50/4767663
aacataagttt

SEQ ID NO: 188730 - DNA, 11 bp, Unknown
  misc_feature (1)..( 11): Result.005 file - promoters50/4767663
taaataataaa

SEQ ID NO: 188731 - DNA, 11 bp, Unknown
  misc_feature (1)..( 11): Result.005 file - promoters50/4767663
gtcataaattt

SEQ ID NO: 188732 - DNA, 11 bp, Unknown
  misc_feature (1)..( 11): Result.005 file - promoters50/4767663
ccaatgataca

SEQ ID NO: 188733 - DNA, 11 bp, Unknown
  misc_feature (1)..( 11): Result.005 file - promoters50/4767663
agaatactaaa

SEQ ID NO: 188734 - DNA, 9 bp, Unknown
  misc_feature (1)..( 9): Result.005 file - promoters50/4767663
aaaatgata

SEQ ID NO: 188735 - DNA, 9 bp, Unknown
  misc_feature (1)..( 9): Result.005 file - promoters50/4767663
aaaataata

SEQ ID NO: 188736 - DNA, 9 bp, Unknown
  misc_feature (1)..( 9): Result.005 file - promoters50/4767663
aaaatgctc

SEQ ID NO: 188737 - DNA, 9 bp, Unknown
  misc_feature (1)..( 9): Result.005 file - promoters50/4767663
caaacaatg

SEQ ID NO: 188738 - DNA, 9 bp, Unknown
  misc_feature (1)..( 9): Result.005 file - promoters50/4767663
caaatcata

SEQ ID NO: 188739 - DNA, 9 bp, Unknown
  misc_feature (1)..( 9): Result.005 file - promoters50/4767663
taaatcaaa

SEQ ID NO: 188740 - DNA, 11 bp, Unknown
  misc_feature (1)..( 11): Result.005 file - promoters50/4767663
acaaatgaaaa

SEQ ID NO: 188741 - DNA, 11 bp, Unknown
  misc_feature (1)..( 11): Result.005 file - promoters50/4767663
ataaatgatag

SEQ ID NO: 188742 - DNA, 11 bp, Unknown
  misc_feature (1)..( 11): Result.005 file - promoters50/4767663
ctaaatcaaac

SEQ ID NO: 188743 - DNA, 11 bp, Unknown
  misc_feature (1)..( 11): Result.005 file - promoters50/4767663
aagaattaaac

SEQ ID NO: 188744 - DNA, 11 bp, Unknown
  misc_feature (1)..( 11): Result.005 file - promoters50/4767663
ataagcccata

SEQ ID NO: 188745 - DNA, 11 bp, Unknown
  misc_feature (1)..( 11): Result.005 file - promoters50/4767663
ttaaactctac

SEQ ID NO: 188746 - DNA, 11 bp, Unknown
  misc_feature (1)..( 11): Result.005 file - promoters50/4767663
ttacaccaaat

SEQ ID NO: 188747 - DNA, 11 bp, Unknown
  misc_feature (1)..( 11): Result.005 file - promoters50/4767663
gtatatatata

SEQ ID NO: 188748 - DNA, 11 bp, Unknown
  misc_feature (1)..( 11): Result.005 file - promoters50/4767663
ttatatataac

SEQ ID NO: 188749 - DNA, 11 bp, Unknown
  misc_feature (1)..( 11): Result.005 file - promoters50/4767663
atatatataac

SEQ ID NO: 188750 - DNA, 11 bp, Unknown
  misc_feature (1)..( 11): Result.005 file - promoters50/4767663
atatatttata

SEQ ID NO: 188751 - DNA, 11 bp, Unknown
  misc_feature (1)..( 11): Result.005 file - promoters50/4767663
ttatatataaa

SEQ ID NO: 188752 - DNA, 11 bp, Unknown
  misc_feature (1)..( 11): Result.005 file - promoters50/4767663
atataaataac

SEQ ID NO: 188753 - DNA, 11 bp, Unknown
  misc_feature (1)..( 11): Result.005 file - promoters50/4767663
gtatatatact

SEQ ID NO: 188754 - DNA, 10 bp, Unknown
  misc_feature (1)..( 10): Result.005 file - promoters50/4767663
attgcatttc

SEQ ID NO: 188755 - DNA, 10 bp, Unknown
  misc_feature (1)..( 10): Result.005 file - promoters50/4767663
tttgaatttt

SEQ ID NO: 188756 - DNA, 10 bp, Unknown
  misc_feature (1)..( 10): Result.005 file - promoters50/4767663
ttttaatttg

SEQ ID NO: 188757 - DNA, 10 bp, Unknown
  misc_feature (1)..( 10): Result.005 file - promoters50/4767663
atttaattaa

SEQ ID NO: 188758 - DNA, 10 bp, Unknown
  misc_feature (1)..( 10): Result.005 file - promoters50/4767663
tttaaattac

SEQ ID NO: 188759 - DNA, 11 bp, Unknown
  misc_feature (1)..( 11): Result.005 file - promoters50/4767663
ctgtaatgttc

SEQ ID NO: 188760 - DNA, 12 bp, Unknown
  misc_feature (1)..( 12): Result.005 file - promoters50/4767663
cgaattatatgt

SEQ ID NO: 188761 - DNA, 12 bp, Unknown
  misc_feature (1)..( 12): Result.005 file - promoters50/4767663
agaaatatatgt

SEQ ID NO: 188762 - DNA, 12 bp, Unknown
  misc_feature (1)..( 12): Result.005 file - promoters50/4767663
cgaataatataa

SEQ ID NO: 188763 - DNA, 12 bp, Unknown
  misc_feature (1)..( 12): Result.005 file - promoters50/4767663
acaaaaataaac

SEQ ID NO: 188764 - DNA, 12 bp, Unknown
  misc_feature (1)..( 12): Result.005 file - promoters50/4767663
cacaatatacac

SEQ ID NO: 188765 - DNA, 12 bp, Unknown
  misc_feature (1)..( 12): Result.005 file - promoters50/4767663
tgaaatatcata

SEQ ID NO: 188766 - DNA, 13 bp, Unknown
  misc_feature (1)..( 13): Result.005 file - promoters50/4767663
atttcatttaaac

SEQ ID NO: 188767 - DNA, 13 bp, Unknown
  misc_feature (1)..( 13): Result.005 file - promoters50/4767663
attttattataaa

SEQ ID NO: 188768 - DNA, 14 bp, Unknown
  misc_feature (1)..( 14): Result.005 file - promoters50/4767663
atctcacttatatc

SEQ ID NO: 188769 - DNA, 14 bp, Unknown
  misc_feature (1)..( 14): Result.005 file - promoters50/4767663
ttatttatttacta

SEQ ID NO: 188770 - DNA, 14 bp, Unknown
  misc_feature (1)..( 14): Result.005 file - promoters50/4767663
ttgtctaactcata

SEQ ID NO: 188771 - DNA, 14 bp, Unknown
  misc_feature (1)..( 14): Result.005 file - promoters50/4767663
catacaaatattaa

SEQ ID NO: 188772 - DNA, 10 bp, Unknown
  misc_feature (1)..( 10): Result.005 file - promoters50/4767663
ccaaaatata

SEQ ID NO: 188773 - DNA, 10 bp, Unknown
  misc_feature (1)..( 10): Result.005 file - promoters50/4767663
agaaaatata

SEQ ID NO: 188774 - DNA, 10 bp, Unknown
  misc_feature (1)..( 10): Result.005 file - promoters50/4767663
taataatata

SEQ ID NO: 188775 - DNA, 10 bp, Unknown
  misc_feature (1)..( 10): Result.005 file - promoters50/4767663
agaaaaaata

SEQ ID NO: 188776 - DNA, 10 bp, Unknown
  misc_feature (1)..( 10): Result.005 file - promoters50/4767663
agttaatata

SEQ ID NO: 188777 - DNA, 10 bp, Unknown
  misc_feature (1)..( 10): Result.005 file - promoters50/4767663
agagaatttt

SEQ ID NO: 188778 - DNA, 9 bp, Unknown
  misc_feature (1)..( 9): Result.005 file - promoters50/4767675
aaagcaaat

SEQ ID NO: 188779 - DNA, 9 bp, Unknown
  misc_feature (1)..( 9): Result.005 file - promoters50/4767675
gaagcaaaa

SEQ ID NO: 188780 - DNA, 9 bp, Unknown
  misc_feature (1)..( 9): Result.005 file - promoters50/4767675
aaaacaatt

SEQ ID NO: 188781 - DNA, 9 bp, Unknown
  misc_feature (1)..( 9): Result.005 file - promoters50/4767675
aaagaaaaa

SEQ ID NO: 188782 - DNA, 9 bp, Unknown
  misc_feature (1)..( 9): Result.005 file - promoters50/4767675
taagaaaaa

SEQ ID NO: 188783 - DNA, 9 bp, Unknown
  misc_feature (1)..( 9): Result.005 file - promoters50/4767675
gaaacaaaa

SEQ ID NO: 188784 - DNA, 8 bp, Unknown
  misc_feature (1)..( 8): Result.005 file - promoters50/4767679
aacaatca

SEQ ID NO: 188785 - DNA, 8 bp, Unknown
  misc_feature (1)..( 8): Result.005 file - promoters50/4767679
aacaattc

SEQ ID NO: 188786 - DNA, 8 bp, Unknown
  misc_feature (1)..( 8): Result.005 file - promoters50/4767679
tacaatca

SEQ ID NO: 188787 - DNA, 8 bp, Unknown
  misc_feature (1)..( 8): Result.005 file - promoters50/4767683
atatatat

SEQ ID NO: 188788 - DNA, 8 bp, Unknown
  misc_feature (1)..( 8): Result.005 file - promoters50/4767683
ttatataa

SEQ ID NO: 188789 - DNA, 8 bp, Unknown
  misc_feature (1)..( 8): Result.005 file - promoters50/4767683
atatatat

SEQ ID NO: 188790 - DNA, 8 bp, Unknown
  misc_feature (1)..( 8): Result.005 file - promoters50/4767683
ttatataa

SEQ ID NO: 188791 - DNA, 8 bp, Unknown
  misc_feature (1)..( 8): Result.005 file - promoters50/4767683
ttatatgt

SEQ ID NO: 188792 - DNA, 8 bp, Unknown
  misc_feature (1)..( 8): Result.005 file - promoters50/4767683
ctatataa

SEQ ID NO: 188793 - DNA, 22 bp, Unknown
  misc_feature (1)..( 22): Result.005 file - promoters50/4767683
gaagaaatattgataatatatg

SEQ ID NO: 188794 - DNA, 22 bp, Unknown
  misc_feature (1)..( 22): Result.005 file - promoters50/4767683
ttaaaaaaattaaggatggtaa

SEQ ID NO: 188795 - DNA, 22 bp, Unknown
  misc_feature (1)..( 22): Result.005 file - promoters50/4767683
atgctaatatttactgtaacat

SEQ ID NO: 188796 - DNA, 22 bp, Unknown
  misc_feature (1)..( 22): Result.005 file - promoters50/4767683
ttataaaaactaatgatgctaa

SEQ ID NO: 188797 - DNA, 22 bp, Unknown
  misc_feature (1)..( 22): Result.005 file - promoters50/4767683
atagaaaaataaattaacaatt

SEQ ID NO: 188798 - DNA, 22 bp, Unknown
  misc_feature (1)..( 22): Result.005 file - promoters50/4767683
gtagaaaaaatcaccttaaact

SEQ ID NO: 188799 - DNA, 12 bp, Unknown
  misc_feature (1)..( 12): Result.005 file - promoters50/4767701
cttaagttagtt

SEQ ID NO: 188800 - DNA, 12 bp, Unknown
  misc_feature (1)..( 12): Result.005 file - promoters50/4767701
cataatttagtc

SEQ ID NO: 188801 - DNA, 12 bp, Unknown
  misc_feature (1)..( 12): Result.005 file - promoters50/4767701
aacgccttagtt

SEQ ID NO: 188802 - DNA, 11 bp, Unknown
  misc_feature (1)..( 11): Result.005 file - promoters50/4767701
tgaatttattt

SEQ ID NO: 188803 - DNA, 12 bp, Unknown
  misc_feature (1)..( 12): Result.005 file - promoters50/4767701
cataatgtagaa

SEQ ID NO: 188804 - DNA, 12 bp, Unknown
  misc_feature (1)..( 12): Result.005 file - promoters50/4767701
cttaatgtttgc

SEQ ID NO: 188805 - DNA, 12 bp, Unknown
  misc_feature (1)..( 12): Result.005 file - promoters50/4767701
gctaatgtgaac

SEQ ID NO: 188806 - DNA, 13 bp, Unknown
  misc_feature (1)..( 13): Result.005 file - promoters50/4767701
ctcttgcatagaa

SEQ ID NO: 188807 - DNA, 13 bp, Unknown
  misc_feature (1)..( 13): Result.005 file - promoters50/4767701
tctttgaatattg

SEQ ID NO: 188808 - DNA, 13 bp, Unknown
  misc_feature (1)..( 13): Result.005 file - promoters50/4767701
tctatgaatcatg

SEQ ID NO: 188809 - DNA, 13 bp, Unknown
  misc_feature (1)..( 13): Result.005 file - promoters50/4767701
gttataaatcgtt

SEQ ID NO: 188810 - DNA, 13 bp, Unknown
  misc_feature (1)..( 13): Result.005 file - promoters50/4767701
tttatgaatctgc

SEQ ID NO: 188811 - DNA, 13 bp, Unknown
  misc_feature (1)..( 13): Result.005 file - promoters50/4767701
tgtagaaatcgtt

SEQ ID NO: 188812 - DNA, 10 bp, Unknown
  misc_feature (1)..( 10): Result.005 file - promoters50/4767701
gtgaacttaa

SEQ ID NO: 188813 - DNA, 9 bp, Unknown
  misc_feature (1)..( 9): Result.005 file - promoters50/4767701
tgaatttat

SEQ ID NO: 188814 - DNA, 10 bp, Unknown
  misc_feature (1)..( 10): Result.005 file - promoters50/4767701
cataatttag

SEQ ID NO: 188815 - DNA, 10 bp, Unknown
  misc_feature (1)..( 10): Result.005 file - promoters50/4767701
cataatgtag

SEQ ID NO: 188816 - DNA, 10 bp, Unknown
  misc_feature (1)..( 10): Result.005 file - promoters50/4767701
cttaatgttt

SEQ ID NO: 188817 - DNA, 10 bp, Unknown
  misc_feature (1)..( 10): Result.005 file - promoters50/4767701
gctaatgtga

SEQ ID NO: 188818 - DNA, 12 bp, Unknown
  misc_feature (1)..( 12): Result.005 file - promoters50/4767701
acaataatgggc

SEQ ID NO: 188819 - DNA, 12 bp, Unknown
  misc_feature (1)..( 12): Result.005 file - promoters50/4767701
ctaataatagaa

SEQ ID NO: 188820 - DNA, 12 bp, Unknown
  misc_feature (1)..( 12): Result.005 file - promoters50/4767701
ctaattatacaa

SEQ ID NO: 188821 - DNA, 12 bp, Unknown
  misc_feature (1)..( 12): Result.005 file - promoters50/4767701
tctcttatccaa

SEQ ID NO: 188822 - DNA, 12 bp, Unknown
  misc_feature (1)..( 12): Result.005 file - promoters50/4767701
catgttaaccac

SEQ ID NO: 188823 - DNA, 12 bp, Unknown
  misc_feature (1)..( 12): Result.005 file - promoters50/4767701
gcgcttttccag

SEQ ID NO: 188824 - DNA, 11 bp, Unknown
  misc_feature (1)..( 11): Result.005 file - promoters50/4767701
gcaagaaattc

SEQ ID NO: 188825 - DNA, 11 bp, Unknown
  misc_feature (1)..( 11): Result.005 file - promoters50/4767701
ccaagaacttc

SEQ ID NO: 188826 - DNA, 11 bp, Unknown
  misc_feature (1)..( 11): Result.005 file - promoters50/4767701
attcaaaattc

SEQ ID NO: 188827 - DNA, 11 bp, Unknown
  misc_feature (1)..( 11): Result.005 file - promoters50/4767701
acaaaaaaaaa

SEQ ID NO: 188828 - DNA, 11 bp, Unknown
  misc_feature (1)..( 11): Result.005 file - promoters50/4767701
ctaagaacatt

SEQ ID NO: 188829 - DNA, 11 bp, Unknown
  misc_feature (1)..( 11): Result.005 file - promoters50/4767701
ccacgaaacta

SEQ ID NO: 188830 - DNA, 22 bp, Unknown
  misc_feature (1)..( 22): Result.005 file - promoters50/4767705
tgacaaaatttatctgtaaatg

SEQ ID NO: 188831 - DNA, 22 bp, Unknown
  misc_feature (1)..( 22): Result.005 file - promoters50/4767705
aagaataatgtatacgatgtaa

SEQ ID NO: 188832 - DNA, 22 bp, Unknown
  misc_feature (1)..( 22): Result.005 file - promoters50/4767705
tcttatggtttctctgagtttg

SEQ ID NO: 188833 - DNA, 22 bp, Unknown
  misc_feature (1)..( 22): Result.005 file - promoters50/4767705
caagaaaaattattaaagtata

SEQ ID NO: 188834 - DNA, 22 bp, Unknown
  misc_feature (1)..( 22): Result.005 file - promoters50/4767705
tctttgaattttgtttttggga

SEQ ID NO: 188835 - DNA, 22 bp, Unknown
  misc_feature (1)..( 22): Result.005 file - promoters50/4767705
taataaagattattaaattata

SEQ ID NO: 188836 - DNA, 22 bp, Unknown
  misc_feature (1)..( 22): Result.005 file - promoters50/4767705
tcgactaattttagggtttagt

SEQ ID NO: 188837 - DNA, 14 bp, Unknown
  misc_feature (1)..( 14): Result.005 file - promoters50/4767705
ataataattgaact

SEQ ID NO: 188838 - DNA, 14 bp, Unknown
  misc_feature (1)..( 14): Result.005 file - promoters50/4767705
agaataatgtatac

SEQ ID NO: 188839 - DNA, 14 bp, Unknown
  misc_feature (1)..( 14): Result.005 file - promoters50/4767705
atactaattttttt

SEQ ID NO: 188840 - DNA, 14 bp, Unknown
  misc_feature (1)..( 14): Result.005 file - promoters50/4767705
aaaattattaaagt

SEQ ID NO: 188841 - DNA, 14 bp, Unknown
  misc_feature (1)..( 14): Result.005 file - promoters50/4767705
gtaatgatgagatg

SEQ ID NO: 188842 - DNA, 14 bp, Unknown
  misc_feature (1)..( 14): Result.005 file - promoters50/4767705
ttactaatagaaga

SEQ ID NO: 188843 - DNA, 14 bp, Unknown
  misc_feature (1)..( 14): Result.005 file - promoters50/4767705
atcggattttgcta

SEQ ID NO: 188844 - DNA, 11 bp, Unknown
  misc_feature (1)..( 11): Result.005 file - promoters50/4767705
aaaaatgttat

SEQ ID NO: 188845 - DNA, 11 bp, Unknown
  misc_feature (1)..( 11): Result.005 file - promoters50/4767705
taaattgtctt

SEQ ID NO: 188846 - DNA, 11 bp, Unknown
  misc_feature (1)..( 11): Result.005 file - promoters50/4767705
ctaattttaat

SEQ ID NO: 188847 - DNA, 11 bp, Unknown
  misc_feature (1)..( 11): Result.005 file - promoters50/4767705
aaaaattatta

SEQ ID NO: 188848 - DNA, 11 bp, Unknown
  misc_feature (1)..( 11): Result.005 file - promoters50/4767705
ctaattttagg

SEQ ID NO: 188849 - DNA, 11 bp, Unknown
  misc_feature (1)..( 11): Result.005 file - promoters50/4767705
gggattatctt

SEQ ID NO: 188850 - DNA, 11 bp, Unknown
  misc_feature (1)..( 11): Result.005 file - promoters50/4767705
tgttttttaat

SEQ ID NO: 188851 - DNA, 15 bp, Unknown
  misc_feature (1)..( 15): Result.005 file - promoters50/4767705
atgttatatttttaa

SEQ ID NO: 188852 - DNA, 15 bp, Unknown
  misc_feature (1)..( 15): Result.005 file - promoters50/4767705
catttaaatttatta

SEQ ID NO: 188853 - DNA, 15 bp, Unknown
  misc_feature (1)..( 15): Result.005 file - promoters50/4767705
tgattatttttttaa

SEQ ID NO: 188854 - DNA, 15 bp, Unknown
  misc_feature (1)..( 15): Result.005 file - promoters50/4767705
attttaattttgtta

SEQ ID NO: 188855 - DNA, 15 bp, Unknown
  misc_feature (1)..( 15): Result.005 file - promoters50/4767705
agtctaattttaatt

SEQ ID NO: 188856 - DNA, 15 bp, Unknown
  misc_feature (1)..( 15): Result.005 file - promoters50/4767705
ttagtagatttgtta

SEQ ID NO: 188857 - DNA, 15 bp, Unknown
  misc_feature (1)..( 15): Result.005 file - promoters50/4767705
ctttgaattttgttt

SEQ ID NO: 188858 - DNA, 11 bp, Unknown
  misc_feature (1)..( 11): Result.005 file - promoters50/4767705
tctatataaac

SEQ ID NO: 188859 - DNA, 11 bp, Unknown
  misc_feature (1)..( 11): Result.005 file - promoters50/4767705
ctgttataaaa

SEQ ID NO: 188860 - DNA, 11 bp, Unknown
  misc_feature (1)..( 11): Result.005 file - promoters50/4767705
tctatataaac

SEQ ID NO: 188861 - DNA, 11 bp, Unknown
  misc_feature (1)..( 11): Result.005 file - promoters50/4767705
tatatataaat

SEQ ID NO: 188862 - DNA, 11 bp, Unknown
  misc_feature (1)..( 11): Result.005 file - promoters50/4767705
cctatatatat

SEQ ID NO: 188863 - DNA, 11 bp, Unknown
  misc_feature (1)..( 11): Result.005 file - promoters50/4767705
actatatatat

SEQ ID NO: 188864 - DNA, 11 bp, Unknown
  misc_feature (1)..( 11): Result.005 file - promoters50/4767705
tttatttatat

SEQ ID NO: 188865 - DNA, 12 bp, Unknown
  misc_feature (1)..( 12): Result.005 file - promoters50/4767705
aaaaaaattgat

SEQ ID NO: 188866 - DNA, 12 bp, Unknown
  misc_feature (1)..( 12): Result.005 file - promoters50/4767705
ctctaaattgag

SEQ ID NO: 188867 - DNA, 12 bp, Unknown
  misc_feature (1)..( 12): Result.005 file - promoters50/4767705
tgaaaaattcta

SEQ ID NO: 188868 - DNA, 12 bp, Unknown
  misc_feature (1)..( 12): Result.005 file - promoters50/4767705
cgtataatggat

SEQ ID NO: 188869 - DNA, 12 bp, Unknown
  misc_feature (1)..( 12): Result.005 file - promoters50/4767705
aaaataattgat

SEQ ID NO: 188870 - DNA, 12 bp, Unknown
  misc_feature (1)..( 12): Result.005 file - promoters50/4767705
caaacaatcatt

SEQ ID NO: 188871 - DNA, 9 bp, Unknown
  misc_feature (1)..( 9): Result.005 file - promoters50/4767705
ggataaaat

SEQ ID NO: 188872 - DNA, 9 bp, Unknown
  misc_feature (1)..( 9): Result.005 file - promoters50/4767705
tgataaaaa

SEQ ID NO: 188873 - DNA, 9 bp, Unknown
  misc_feature (1)..( 9): Result.005 file - promoters50/4767705
gtatataat

SEQ ID NO: 188874 - DNA, 9 bp, Unknown
  misc_feature (1)..( 9): Result.005 file - promoters50/4767705
aaatataat

SEQ ID NO: 188875 - DNA, 9 bp, Unknown
  misc_feature (1)..( 9): Result.005 file - promoters50/4767705
gactaaaaa

SEQ ID NO: 188876 - DNA, 9 bp, Unknown
  misc_feature (1)..( 9): Result.005 file - promoters50/4767705
gaccaaaat

SEQ ID NO: 188877 - DNA, 15 bp, Unknown
  misc_feature (1)..( 15): Result.005 file - promoters50/4767705
atgcaaataattatt

SEQ ID NO: 188878 - DNA, 15 bp, Unknown
  misc_feature (1)..( 15): Result.005 file - promoters50/4767705
tgataaaaaatatat

SEQ ID NO: 188879 - DNA, 15 bp, Unknown
  misc_feature (1)..( 15): Result.005 file - promoters50/4767705
cagtatataatttta

SEQ ID NO: 188880 - DNA, 15 bp, Unknown
  misc_feature (1)..( 15): Result.005 file - promoters50/4767705
gactaaaaattttaa

SEQ ID NO: 188881 - DNA, 15 bp, Unknown
  misc_feature (1)..( 15): Result.005 file - promoters50/4767705
gaccaaaattacaaa

SEQ ID NO: 188882 - DNA, 15 bp, Unknown
  misc_feature (1)..( 15): Result.005 file - promoters50/4767705
aagagtctaatttta

SEQ ID NO: 188883 - DNA, 15 bp, Unknown
  misc_feature (1)..( 15): Result.005 file - promoters50/4767705
ttgttaattaacaat

SEQ ID NO: 188884 - DNA, 15 bp, Unknown
  misc_feature (1)..( 15): Result.005 file - promoters50/4767705
cacttatttattctc

SEQ ID NO: 188885 - DNA, 15 bp, Unknown
  misc_feature (1)..( 15): Result.005 file - promoters50/4767705
aaataaattaacaat

SEQ ID NO: 188886 - DNA, 15 bp, Unknown
  misc_feature (1)..( 15): Result.005 file - promoters50/4767705
ctaatatttactgta

SEQ ID NO: 188887 - DNA, 15 bp, Unknown
  misc_feature (1)..( 15): Result.005 file - promoters50/4767705
aaaaaaattaaggat

SEQ ID NO: 188888 - DNA, 15 bp, Unknown
  misc_feature (1)..( 15): Result.005 file - promoters50/4767705
ctcacaattcataaa

SEQ ID NO: 188889 - DNA, 11 bp, Unknown
  misc_feature (1)..( 11): Result.005 file - promoters50/4767705
tctatataaac

SEQ ID NO: 188890 - DNA, 11 bp, Unknown
  misc_feature (1)..( 11): Result.005 file - promoters50/4767705
tatatatagag

SEQ ID NO: 188891 - DNA, 11 bp, Unknown
  misc_feature (1)..( 11): Result.005 file - promoters50/4767705
actatatatat

SEQ ID NO: 188892 - DNA, 11 bp, Unknown
  misc_feature (1)..( 11): Result.005 file - promoters50/4767705
tctatataaac

SEQ ID NO: 188893 - DNA, 11 bp, Unknown
  misc_feature (1)..( 11): Result.005 file - promoters50/4767705
cgtatatataa

SEQ ID NO: 188894 - DNA, 11 bp, Unknown
  misc_feature (1)..( 11): Result.005 file - promoters50/4767705
tttatttatat

SEQ ID NO: 188895 - DNA, 17 bp, Unknown
  misc_feature (1)..( 17): Result.005 file - promoters50/4767705
aataattgaactaaaaa

SEQ ID NO: 188896 - DNA, 17 bp, Unknown
  misc_feature (1)..( 17): Result.005 file - promoters50/4767705
actaatagaagagtcta

SEQ ID NO: 188897 - DNA, 17 bp, Unknown
  misc_feature (1)..( 17): Result.005 file - promoters50/4767705
aaaaattattaaagtat

SEQ ID NO: 188898 - DNA, 17 bp, Unknown
  misc_feature (1)..( 17): Result.005 file - promoters50/4767705
tcttattaaaatcaatg

SEQ ID NO: 188899 - DNA, 17 bp, Unknown
  misc_feature (1)..( 17): Result.005 file - promoters50/4767705
aatgattatttttttaa

SEQ ID NO: 188900 - DNA, 17 bp, Unknown
  misc_feature (1)..( 17): Result.005 file - promoters50/4767705
tgggattatcttgtcca

SEQ ID NO: 188901 - DNA, 17 bp, Unknown
  misc_feature (1)..( 17): Result.005 file - promoters50/4767705
ctgtttagatgagtcac

SEQ ID NO: 188902 - DNA, 17 bp, Unknown
  misc_feature (1)..( 17): Result.005 file - promoters50/4767705
actaattttagggttta

SEQ ID NO: 188903 - DNA, 11 bp, Unknown
  misc_feature (1)..( 11): Result.005 file - promoters50/4767709
caacaatcttt

SEQ ID NO: 188904 - DNA, 11 bp, Unknown
  misc_feature (1)..( 11): Result.005 file - promoters50/4767709
caaaaatagac

SEQ ID NO: 188905 - DNA, 11 bp, Unknown
  misc_feature (1)..( 11): Result.005 file - promoters50/4767709
aaaaaatagac

SEQ ID NO: 188906 - DNA, 7 bp, Unknown
  misc_feature (1)..( 7): Result.005 file - promoters50/4767709
attgtgg

SEQ ID NO: 188907 - DNA, 7 bp, Unknown
  misc_feature (1)..( 7): Result.005 file - promoters50/4767709
attgtga

SEQ ID NO: 188908 - DNA, 7 bp, Unknown
  misc_feature (1)..( 7): Result.005 file - promoters50/4767709
attttga

SEQ ID NO: 188909 - DNA, 9 bp, Unknown
  misc_feature (1)..( 9): Result.005 file - promoters50/4767715
gtattatat

SEQ ID NO: 188910 - DNA, 9 bp, Unknown
  misc_feature (1)..( 9): Result.005 file - promoters50/4767715
gtattatta

SEQ ID NO: 188911 - DNA, 9 bp, Unknown
  misc_feature (1)..( 9): Result.005 file - promoters50/4767715
ttataatac

SEQ ID NO: 188912 - DNA, 9 bp, Unknown
  misc_feature (1)..( 9): Result.005 file - promoters50/4767715
ctatgattc

SEQ ID NO: 188913 - DNA, 9 bp, Unknown
  misc_feature (1)..( 9): Result.005 file - promoters50/4767715
aaataatac

SEQ ID NO: 188914 - DNA, 9 bp, Unknown
  misc_feature (1)..( 9): Result.005 file - promoters50/4767715
acataatac

SEQ ID NO: 188915 - DNA, 14 bp, Unknown
  misc_feature (1)..( 14): Result.005 file - promoters50/4767722
agtttaattattcc

SEQ ID NO: 188916 - DNA, 14 bp, Unknown
  misc_feature (1)..( 14): Result.005 file - promoters50/4767722
aattttattaaaaa

SEQ ID NO: 188917 - DNA, 14 bp, Unknown
  misc_feature (1)..( 14): Result.005 file - promoters50/4767722
attttaatgaagta

SEQ ID NO: 188918 - DNA, 14 bp, Unknown
  misc_feature (1)..( 14): Result.005 file - promoters50/4767722
aatttaattctaat

SEQ ID NO: 188919 - DNA, 14 bp, Unknown
  misc_feature (1)..( 14): Result.005 file - promoters50/4767722
ttttttataaagaa

SEQ ID NO: 188920 - DNA, 14 bp, Unknown
  misc_feature (1)..( 14): Result.005 file - promoters50/4767722
tttttgatagagaa

SEQ ID NO: 188921 - DNA, 11 bp, Unknown
  misc_feature (1)..( 11): Result.005 file - promoters50/4767722
gcctattacaa

SEQ ID NO: 188922 - DNA, 11 bp, Unknown
  misc_feature (1)..( 11): Result.005 file - promoters50/4767722
cccttttatgt

SEQ ID NO: 188923 - DNA, 11 bp, Unknown
  misc_feature (1)..( 11): Result.005 file - promoters50/4767722
tagttttatgt

SEQ ID NO: 188924 - DNA, 11 bp, Unknown
  misc_feature (1)..( 11): Result.005 file - promoters50/4767722
ggtttttattc

SEQ ID NO: 188925 - DNA, 11 bp, Unknown
  misc_feature (1)..( 11): Result.005 file - promoters50/4767722
ggttattatca

SEQ ID NO: 188926 - DNA, 11 bp, Unknown
  misc_feature (1)..( 11): Result.005 file - promoters50/4767722
tgttatttgaa

SEQ ID NO: 188927 - DNA, 14 bp, Unknown
  misc_feature (1)..( 14): Result.005 file - promoters50/4767722
ctttcaaagaatca

SEQ ID NO: 188928 - DNA, 14 bp, Unknown
  misc_feature (1)..( 14): Result.005 file - promoters50/4767722
ttctgaaagaaagc

SEQ ID NO: 188929 - DNA, 14 bp, Unknown
  misc_feature (1)..( 14): Result.005 file - promoters50/4767722
ttgttaaaaaatca

SEQ ID NO: 188930 - DNA, 14 bp, Unknown
  misc_feature (1)..( 14): Result.005 file - promoters50/4767722
gttataaatttgta

SEQ ID NO: 188931 - DNA, 14 bp, Unknown
  misc_feature (1)..( 14): Result.005 file - promoters50/4767722
agattaaaaaaaaa

SEQ ID NO: 188932 - DNA, 7 bp, Unknown
  misc_feature (1)..( 7): Result.005 file - promoters50/4767733
gagaaaa

SEQ ID NO: 188933 - DNA, 7 bp, Unknown
  misc_feature (1)..( 7): Result.005 file - promoters50/4767733
gagaaag

SEQ ID NO: 188934 - DNA, 7 bp, Unknown
  misc_feature (1)..( 7): Result.005 file - promoters50/4767733
gagaaag

SEQ ID NO: 188935 - DNA, 7 bp, Unknown
  misc_feature (1)..( 7): Result.005 file - promoters50/4767733
tcaaaat

SEQ ID NO: 188936 - DNA, 7 bp, Unknown
  misc_feature (1)..( 7): Result.005 file - promoters50/4767733
tcaaaag

SEQ ID NO: 188937 - DNA, 7 bp, Unknown
  misc_feature (1)..( 7): Result.005 file - promoters50/4767733
ccaaaag

SEQ ID NO: 188938 - DNA, 12 bp, Unknown
  misc_feature (1)..( 12): Result.005 file - promoters50/4767748
tcaatatatttt

SEQ ID NO: 188939 - DNA, 12 bp, Unknown
  misc_feature (1)..( 12): Result.005 file - promoters50/4767748
ttaataaatttt

SEQ ID NO: 188940 - DNA, 12 bp, Unknown
  misc_feature (1)..( 12): Result.005 file - promoters50/4767748
ataataactctt

SEQ ID NO: 188941 - DNA, 12 bp, Unknown
  misc_feature (1)..( 12): Result.005 file - promoters50/4767748
ctaaaaaatatt

SEQ ID NO: 188942 - DNA, 12 bp, Unknown
  misc_feature (1)..( 12): Result.005 file - promoters50/4767748
atactaaagttt

SEQ ID NO: 188943 - DNA, 12 bp, Unknown
  misc_feature (1)..( 12): Result.005 file - promoters50/4767748
ttaaaaaagtgt

SEQ ID NO: 188944 - DNA, 12 bp, Unknown
  misc_feature (1)..( 12): Result.005 file - promoters50/4767748
aacaaacataac

SEQ ID NO: 188945 - DNA, 10 bp, Unknown
  misc_feature (1)..( 10): Result.005 file - promoters50/4767748
tatagcaaaa

SEQ ID NO: 188946 - DNA, 10 bp, Unknown
  misc_feature (1)..( 10): Result.005 file - promoters50/4767748
tttagtaaaa

SEQ ID NO: 188947 - DNA, 10 bp, Unknown
  misc_feature (1)..( 10): Result.005 file - promoters50/4767748
aatatcaaag

SEQ ID NO: 188948 - DNA, 10 bp, Unknown
  misc_feature (1)..( 10): Result.005 file - promoters50/4767748
ttttgtatta

SEQ ID NO: 188949 - DNA, 10 bp, Unknown
  misc_feature (1)..( 10): Result.005 file - promoters50/4767748
ttttgtttaa

SEQ ID NO: 188950 - DNA, 10 bp, Unknown
  misc_feature (1)..( 10): Result.005 file - promoters50/4767748
aagagtgaaa

SEQ ID NO: 188951 - DNA, 9 bp, Unknown
  misc_feature (1)..( 9): Result.005 file - promoters50/4767755
ttattatac

SEQ ID NO: 188952 - DNA, 9 bp, Unknown
  misc_feature (1)..( 9): Result.005 file - promoters50/4767755
ttaatatta

SEQ ID NO: 188953 - DNA, 9 bp, Unknown
  misc_feature (1)..( 9): Result.005 file - promoters50/4767755
gtaaaatta

SEQ ID NO: 188954 - DNA, 8 bp, Unknown
  misc_feature (1)..( 8): Result.005 file - promoters50/4767755
gtattttt

SEQ ID NO: 188955 - DNA, 8 bp, Unknown
  misc_feature (1)..( 8): Result.005 file - promoters50/4767755
agattttt

SEQ ID NO: 188956 - DNA, 8 bp, Unknown
  misc_feature (1)..( 8): Result.005 file - promoters50/4767755
agagtttg

SEQ ID NO: 188957 - DNA, 8 bp, Unknown
  misc_feature (1)..( 8): Result.005 file - promoters50/4767755
caaatttt

SEQ ID NO: 188958 - DNA, 8 bp, Unknown
  misc_feature (1)..( 8): Result.005 file - promoters50/4767755
caattttt

SEQ ID NO: 188959 - DNA, 8 bp, Unknown
  misc_feature (1)..( 8): Result.005 file - promoters50/4767755
taaatttg

SEQ ID NO: 188960 - DNA, 8 bp, Unknown
  misc_feature (1)..( 8): Result.005 file - promoters50/4767755
aattttct

SEQ ID NO: 188961 - DNA, 8 bp, Unknown
  misc_feature (1)..( 8): Result.005 file - promoters50/4767755
ttttttct

SEQ ID NO: 188962 - DNA, 8 bp, Unknown
  misc_feature (1)..( 8): Result.005 file - promoters50/4767755
ttttttca

SEQ ID NO: 188963 - DNA, 7 bp, Unknown
  misc_feature (1)..( 7): Result.005 file - promoters50/4767755
ataaaac

SEQ ID NO: 188964 - DNA, 7 bp, Unknown
  misc_feature (1)..( 7): Result.005 file - promoters50/4767755
ataaaag

SEQ ID NO: 188965 - DNA, 7 bp, Unknown
  misc_feature (1)..( 7): Result.005 file - promoters50/4767755
ataaaac

SEQ ID NO: 188966 - DNA, 11 bp, Unknown
  misc_feature (1)..( 11): Result.005 file - promoters50/4767755
caaaaaaaaaa

SEQ ID NO: 188967 - DNA, 11 bp, Unknown
  misc_feature (1)..( 11): Result.005 file - promoters50/4767755
caaaagaaaaa

SEQ ID NO: 188968 - DNA, 11 bp, Unknown
  misc_feature (1)..( 11): Result.005 file - promoters50/4767755
agagagacaaa

SEQ ID NO: 188969 - DNA, 15 bp, Unknown
  misc_feature (1)..( 15): Result.005 file - promoters50/4767764
gcattggatagatat

SEQ ID NO: 188970 - DNA, 15 bp, Unknown
  misc_feature (1)..( 15): Result.005 file - promoters50/4767764
aaattgtatacatat

SEQ ID NO: 188971 - DNA, 15 bp, Unknown
  misc_feature (1)..( 15): Result.005 file - promoters50/4767764
aaattggatccgaaa

SEQ ID NO: 188972 - DNA, 15 bp, Unknown
  misc_feature (1)..( 15): Result.005 file - promoters50/4767764
taattctatgtattt

SEQ ID NO: 188973 - DNA, 15 bp, Unknown
  misc_feature (1)..( 15): Result.005 file - promoters50/4767764
aaattgtttcaaacg

SEQ ID NO: 188974 - DNA, 15 bp, Unknown
  misc_feature (1)..( 15): Result.005 file - promoters50/4767764
ttattttataggtcc

SEQ ID NO: 188975 - DNA, 15 bp, Unknown
  misc_feature (1)..( 15): Result.005 file - promoters50/4767764
acattttatccttca

SEQ ID NO: 188976 - DNA, 14 bp, Unknown
  misc_feature (1)..( 14): Result.005 file - promoters50/4767764
ttataatctttaat

SEQ ID NO: 188977 - DNA, 14 bp, Unknown
  misc_feature (1)..( 14): Result.005 file - promoters50/4767764
tgaaaatgtttata

SEQ ID NO: 188978 - DNA, 14 bp, Unknown
  misc_feature (1)..( 14): Result.005 file - promoters50/4767764
attcgatctttttg

SEQ ID NO: 188979 - DNA, 14 bp, Unknown
  misc_feature (1)..( 14): Result.005 file - promoters50/4767764
tcatcatccttatc

SEQ ID NO: 188980 - DNA, 14 bp, Unknown
  misc_feature (1)..( 14): Result.005 file - promoters50/4767764
attagattttttac

SEQ ID NO: 188981 - DNA, 14 bp, Unknown
  misc_feature (1)..( 14): Result.005 file - promoters50/4767764
aaaaaattggatcc

SEQ ID NO: 188982 - DNA, 14 bp, Unknown
  misc_feature (1)..( 14): Result.005 file - promoters50/4767764
accttttcttgttg

SEQ ID NO: 188983 - DNA, 12 bp, Unknown
  misc_feature (1)..( 12): Result.005 file - promoters50/4767764
gagatctttata

SEQ ID NO: 188984 - DNA, 12 bp, Unknown
  misc_feature (1)..( 12): Result.005 file - promoters50/4767764
tagattttttac

SEQ ID NO: 188985 - DNA, 12 bp, Unknown
  misc_feature (1)..( 12): Result.005 file - promoters50/4767764
tcgatctttttg

SEQ ID NO: 188986 - DNA, 12 bp, Unknown
  misc_feature (1)..( 12): Result.005 file - promoters50/4767764
atcatccttatc

SEQ ID NO: 188987 - DNA, 12 bp, Unknown
  misc_feature (1)..( 12): Result.005 file - promoters50/4767764
tagattgctgat

SEQ ID NO: 188988 - DNA, 12 bp, Unknown
  misc_feature (1)..( 12): Result.005 file - promoters50/4767764
cttttcttgttg

SEQ ID NO: 188989 - DNA, 9 bp, Unknown
  misc_feature (1)..( 9): Result.005 file - promoters50/4767764
caaaataac

SEQ ID NO: 188990 - DNA, 9 bp, Unknown
  misc_feature (1)..( 9): Result.005 file - promoters50/4767764
aaaaaaaac

SEQ ID NO: 188991 - DNA, 9 bp, Unknown
  misc_feature (1)..( 9): Result.005 file - promoters50/4767764
aaaaataga

SEQ ID NO: 188992 - DNA, 9 bp, Unknown
  misc_feature (1)..( 9): Result.005 file - promoters50/4767764
gaaaatact

SEQ ID NO: 188993 - DNA, 9 bp, Unknown
  misc_feature (1)..( 9): Result.005 file - promoters50/4767764
gaacaaaag

SEQ ID NO: 188994 - DNA, 9 bp, Unknown
  misc_feature (1)..( 9): Result.005 file - promoters50/4767764
taaaacagc

SEQ ID NO: 188995 - DNA, 10 bp, Unknown
  misc_feature (1)..( 10): Result.005 file - promoters50/4767767
aaccttgaaa

SEQ ID NO: 188996 - DNA, 10 bp, Unknown
  misc_feature (1)..( 10): Result.005 file - promoters50/4767767
aaccttaaaa

SEQ ID NO: 188997 - DNA, 10 bp, Unknown
  misc_feature (1)..( 10): Result.005 file - promoters50/4767767
aacattataa

SEQ ID NO: 188998 - DNA, 10 bp, Unknown
  misc_feature (1)..( 10): Result.005 file - promoters50/4767767
aacctgaaaa

SEQ ID NO: 188999 - DNA, 10 bp, Unknown
  misc_feature (1)..( 10): Result.005 file - promoters50/4767767
aaaatctata

SEQ ID NO: 189000 - DNA, 10 bp, Unknown
  misc_feature (1)..( 10): Result.005 file - promoters50/4767767
tttatctatt

SEQ ID NO: 189001 - DNA, 10 bp, Unknown
  misc_feature (1)..( 10): Result.005 file - promoters50/4767767
cgaatccata

SEQ ID NO: 189002 - DNA, 10 bp, Unknown
  misc_feature (1)..( 10): Result.005 file - promoters50/4767767
cgaaaccaac

SEQ ID NO: 189003 - DNA, 10 bp, Unknown
  misc_feature (1)..( 10): Result.005 file - promoters50/4767767
cacagtatta

SEQ ID NO: 189004 - DNA, 10 bp, Unknown
  misc_feature (1)..( 10): Result.005 file - promoters50/4767767
aacattataa

SEQ ID NO: 189005 - DNA, 10 bp, Unknown
  misc_feature (1)..( 10): Result.005 file - promoters50/4767767
aaccttaaaa

SEQ ID NO: 189006 - DNA, 10 bp, Unknown
  misc_feature (1)..( 10): Result.005 file - promoters50/4767767
aacctgaaaa

SEQ ID NO: 189007 - DNA, 14 bp, Unknown
  misc_feature (1)..( 14): Result.005 file - promoters50/4767795
ctcaaaattgatta

SEQ ID NO: 189008 - DNA, 14 bp, Unknown
  misc_feature (1)..( 14): Result.005 file - promoters50/4767795
ctcaaacttgtttc

SEQ ID NO: 189009 - DNA, 14 bp, Unknown
  misc_feature (1)..( 14): Result.005 file - promoters50/4767795
cataaaatcataat

SEQ ID NO: 189010 - DNA, 10 bp, Unknown
  misc_feature (1)..( 10): Result.005 file - promoters50/4767795
tgattagtta

SEQ ID NO: 189011 - DNA, 10 bp, Unknown
  misc_feature (1)..( 10): Result.005 file - promoters50/4767795
tcattagtta

SEQ ID NO: 189012 - DNA, 10 bp, Unknown
  misc_feature (1)..( 10): Result.005 file - promoters50/4767795
tgattagcaa

SEQ ID NO: 189013 - DNA, 8 bp, Unknown
  misc_feature (1)..( 8): Result.005 file - promoters50/4767795
tttcataa

SEQ ID NO: 189014 - DNA, 8 bp, Unknown
  misc_feature (1)..( 8): Result.005 file - promoters50/4767795
tttcttaa

SEQ ID NO: 189015 - DNA, 8 bp, Unknown
  misc_feature (1)..( 8): Result.005 file - promoters50/4767795
tttattaa

SEQ ID NO: 189016 - DNA, 9 bp, Unknown
  misc_feature (1)..( 9): Result.005 file - promoters50/4767799
tttattgag

SEQ ID NO: 189017 - DNA, 9 bp, Unknown
  misc_feature (1)..( 9): Result.005 file - promoters50/4767799
gagattgag

SEQ ID NO: 189018 - DNA, 9 bp, Unknown
  misc_feature (1)..( 9): Result.005 file - promoters50/4767799
gagcttgag

SEQ ID NO: 189019 - DNA, 10 bp, Unknown
  misc_feature (1)..( 10): Result.005 file - promoters50/4767799
tgagctttat

SEQ ID NO: 189020 - DNA, 10 bp, Unknown
  misc_feature (1)..( 10): Result.005 file - promoters50/4767799
tgagcttgag

SEQ ID NO: 189021 - DNA, 10 bp, Unknown
  misc_feature (1)..( 10): Result.005 file - promoters50/4767799
agagattgag

SEQ ID NO: 189022 - DNA, 8 bp, Unknown
  misc_feature (1)..( 8): Result.005 file - promoters50/4767799
ttaaacat

SEQ ID NO: 189023 - DNA, 8 bp, Unknown
  misc_feature (1)..( 8): Result.005 file - promoters50/4767799
ctaaacat

SEQ ID NO: 189024 - DNA, 8 bp, Unknown
  misc_feature (1)..( 8): Result.005 file - promoters50/4767799
ctaaacaa

SEQ ID NO: 189025 - DNA, 9 bp, Unknown
  misc_feature (1)..( 9): Result.005 file - promoters50/4767803
tgagttttt

SEQ ID NO: 189026 - DNA, 9 bp, Unknown
  misc_feature (1)..( 9): Result.005 file - promoters50/4767803
atagtttta

SEQ ID NO: 189027 - DNA, 9 bp, Unknown
  misc_feature (1)..( 9): Result.005 file - promoters50/4767803
tttgttttt

SEQ ID NO: 189028 - DNA, 10 bp, Unknown
  misc_feature (1)..( 10): Result.005 file - promoters50/4767803
tgagttcttt

SEQ ID NO: 189029 - DNA, 10 bp, Unknown
  misc_feature (1)..( 10): Result.005 file - promoters50/4767803
aaatctttta

SEQ ID NO: 189030 - DNA, 10 bp, Unknown
  misc_feature (1)..( 10): Result.005 file - promoters50/4767803
ctatctttct

SEQ ID NO: 189031 - DNA, 10 bp, Unknown
  misc_feature (1)..( 10): Result.005 file - promoters50/4767803
ctaactttct

SEQ ID NO: 189032 - DNA, 10 bp, Unknown
  misc_feature (1)..( 10): Result.005 file - promoters50/4767803
ataaatttat

SEQ ID NO: 189033 - DNA, 12 bp, Unknown
  misc_feature (1)..( 12): Result.005 file - promoters50/4767803
taatatttttgt

SEQ ID NO: 189034 - DNA, 12 bp, Unknown
  misc_feature (1)..( 12): Result.005 file - promoters50/4767803
ctatctttctgt

SEQ ID NO: 189035 - DNA, 12 bp, Unknown
  misc_feature (1)..( 12): Result.005 file - promoters50/4767803
ctaactttctcg

SEQ ID NO: 189036 - DNA, 12 bp, Unknown
  misc_feature (1)..( 12): Result.005 file - promoters50/4767803
ataaatttattt

SEQ ID NO: 189037 - DNA, 8 bp, Unknown
  misc_feature (1)..( 8): Result.005 file - promoters50/4767803
atattttt

SEQ ID NO: 189038 - DNA, 8 bp, Unknown
  misc_feature (1)..( 8): Result.005 file - promoters50/4767803
ttattttc

SEQ ID NO: 189039 - DNA, 8 bp, Unknown
  misc_feature (1)..( 8): Result.005 file - promoters50/4767803
atatcttc

SEQ ID NO: 189040 - DNA, 8 bp, Unknown
  misc_feature (1)..( 8): Result.005 file - promoters50/4767803
ataccttt

SEQ ID NO: 189041 - DNA, 8 bp, Unknown
  misc_feature (1)..( 8): Result.005 file - promoters50/4767821
aaaaataa

SEQ ID NO: 189042 - DNA, 8 bp, Unknown
  misc_feature (1)..( 8): Result.005 file - promoters50/4767821
taaattaa

SEQ ID NO: 189043 - DNA, 8 bp, Unknown
  misc_feature (1)..( 8): Result.005 file - promoters50/4767821
taaattga

SEQ ID NO: 189044 - DNA, 10 bp, Unknown
  misc_feature (1)..( 10): Result.005 file - promoters50/4767821
caaatcgaaa

SEQ ID NO: 189045 - DNA, 10 bp, Unknown
  misc_feature (1)..( 10): Result.005 file - promoters50/4767821
taaattgaaa

SEQ ID NO: 189046 - DNA, 10 bp, Unknown
  misc_feature (1)..( 10): Result.005 file - promoters50/4767821
taaattaaat

SEQ ID NO: 189047 - DNA, 9 bp, Unknown
  misc_feature (1)..( 9): Result.005 file - promoters50/4767821
ttagatact

SEQ ID NO: 189048 - DNA, 9 bp, Unknown
  misc_feature (1)..( 9): Result.005 file - promoters50/4767821
ttatatata

SEQ ID NO: 189049 - DNA, 9 bp, Unknown
  misc_feature (1)..( 9): Result.005 file - promoters50/4767821
ctatatata

SEQ ID NO: 189050 - DNA, 6 bp, Unknown
  misc_feature (1)..( 6): Result.005 file - promoters50/4767829
aaattt

SEQ ID NO: 189051 - DNA, 6 bp, Unknown
  misc_feature (1)..( 6): Result.005 file - promoters50/4767829
aaattt

SEQ ID NO: 189052 - DNA, 7 bp, Unknown
  misc_feature (1)..( 7): Result.005 file - promoters50/4767829
aaagttt

SEQ ID NO: 189053 - DNA, 10 bp, Unknown
  misc_feature (1)..( 10): Result.005 file - promoters50/4767829
taacaatttt

SEQ ID NO: 189054 - DNA, 10 bp, Unknown
  misc_feature (1)..( 10): Result.005 file - promoters50/4767829
taaaaatttt

SEQ ID NO: 189055 - DNA, 10 bp, Unknown
  misc_feature (1)..( 10): Result.005 file - promoters50/4767829
taaaaagctc

SEQ ID NO: 189056 - DNA, 8 bp, Unknown
  misc_feature (1)..( 8): Result.005 file - promoters50/4767829
ataccaac

SEQ ID NO: 189057 - DNA, 8 bp, Unknown
  misc_feature (1)..( 8): Result.005 file - promoters50/4767829
ttacaaac

SEQ ID NO: 189058 - DNA, 8 bp, Unknown
  misc_feature (1)..( 8): Result.005 file - promoters50/4767829
atatcaac

SEQ ID NO: 189059 - DNA, 9 bp, Unknown
  misc_feature (1)..( 9): Result.005 file - promoters50/4767829
aacaaaatg

SEQ ID NO: 189060 - DNA, 9 bp, Unknown
  misc_feature (1)..( 9): Result.005 file - promoters50/4767829
aacgaaaga

SEQ ID NO: 189061 - DNA, 9 bp, Unknown
  misc_feature (1)..( 9): Result.005 file - promoters50/4767829
gtcgaaaga

SEQ ID NO: 189062 - DNA, 9 bp, Unknown
  misc_feature (1)..( 9): Result.005 file - promoters50/4767829
tttttttta

SEQ ID NO: 189063 - DNA, 9 bp, Unknown
  misc_feature (1)..( 9): Result.005 file - promoters50/4767829
catttatta

SEQ ID NO: 189064 - DNA, 9 bp, Unknown
  misc_feature (1)..( 9): Result.005 file - promoters50/4767829
catttatca

SEQ ID NO: 189065 - DNA, 10 bp, Unknown
  misc_feature (1)..( 10): Result.005 file - promoters50/4767829
ttttcgaaag

SEQ ID NO: 189066 - DNA, 10 bp, Unknown
  misc_feature (1)..( 10): Result.005 file - promoters50/4767829
ttttggaaat

SEQ ID NO: 189067 - DNA, 10 bp, Unknown
  misc_feature (1)..( 10): Result.005 file - promoters50/4767829
ccaaggaaat

SEQ ID NO: 189068 - DNA, 8 bp, Unknown
  misc_feature (1)..( 8): Result.005 file - promoters50/4767829
ttatcaga

SEQ ID NO: 189069 - DNA, 8 bp, Unknown
  misc_feature (1)..( 8): Result.005 file - promoters50/4767829
ttatcatt

SEQ ID NO: 189070 - DNA, 8 bp, Unknown
  misc_feature (1)..( 8): Result.005 file - promoters50/4767829
ctatcatt

SEQ ID NO: 189071 - DNA, 9 bp, Unknown
  misc_feature (1)..( 9): Result.005 file - promoters50/4767829
ataattttg

SEQ ID NO: 189072 - DNA, 9 bp, Unknown
  misc_feature (1)..( 9): Result.005 file - promoters50/4767829
ataattttc

SEQ ID NO: 189073 - DNA, 9 bp, Unknown
  misc_feature (1)..( 9): Result.005 file - promoters50/4767829
tgtattttc

SEQ ID NO: 189074 - DNA, 9 bp, Unknown
  misc_feature (1)..( 9): Result.005 file - promoters50/4767829
aagataaga

SEQ ID NO: 189075 - DNA, 9 bp, Unknown
  misc_feature (1)..( 9): Result.005 file - promoters50/4767829
aagaaaaga

SEQ ID NO: 189076 - DNA, 9 bp, Unknown
  misc_feature (1)..( 9): Result.005 file - promoters50/4767829
aataaaatt

SEQ ID NO: 189077 - DNA, 9 bp, Unknown
  misc_feature (1)..( 9): Result.005 file - promoters50/4767837
ttcttcaat

SEQ ID NO: 189078 - DNA, 9 bp, Unknown
  misc_feature (1)..( 9): Result.005 file - promoters50/4767837
ctcttcata

SEQ ID NO: 189079 - DNA, 9 bp, Unknown
  misc_feature (1)..( 9): Result.005 file - promoters50/4767837
ttctacaat

SEQ ID NO: 189080 - DNA, 12 bp, Unknown
  misc_feature (1)..( 12): Result.005 file - promoters50/4767837
acaaaaaacaat

SEQ ID NO: 189081 - DNA, 12 bp, Unknown
  misc_feature (1)..( 12): Result.005 file - promoters50/4767837
acaacaaaaaat

SEQ ID NO: 189082 - DNA, 12 bp, Unknown
  misc_feature (1)..( 12): Result.005 file - promoters50/4767837
ctaaaaaaccgg

SEQ ID NO: 189083 - DNA, 10 bp, Unknown
  misc_feature (1)..( 10): Result.005 file - promoters50/4767863
ataaaacata

SEQ ID NO: 189084 - DNA, 10 bp, Unknown
  misc_feature (1)..( 10): Result.005 file - promoters50/4767863
ttaaaatata

SEQ ID NO: 189085 - DNA, 10 bp, Unknown
  misc_feature (1)..( 10): Result.005 file - promoters50/4767863
ataaaagagg

SEQ ID NO: 189086 - DNA, 8 bp, Unknown
  misc_feature (1)..( 8): Result.005 file - promoters50/4767863
tagagaaa

SEQ ID NO: 189087 - DNA, 8 bp, Unknown
  misc_feature (1)..( 8): Result.005 file - promoters50/4767863
aagaaaaa

SEQ ID NO: 189088 - DNA, 8 bp, Unknown
  misc_feature (1)..( 8): Result.005 file - promoters50/4767863
aagaaagc

SEQ ID NO: 189089 - DNA, 8 bp, Unknown
  misc_feature (1)..( 8): Result.005 file - promoters50/4767871
ttagaagc

SEQ ID NO: 189090 - DNA, 8 bp, Unknown
  misc_feature (1)..( 8): Result.005 file - promoters50/4767871
ttagtagc

SEQ ID NO: 189091 - DNA, 8 bp, Unknown
  misc_feature (1)..( 8): Result.005 file - promoters50/4767871
ttagtaaa

SEQ ID NO: 189092 - DNA, 8 bp, Unknown
  misc_feature (1)..( 8): Result.005 file - promoters50/4767871
ttagtatt

SEQ ID NO: 189093 - DNA, 11 bp, Unknown
  misc_feature (1)..( 11): Result.005 file - promoters50/4767871
tagcactagac

SEQ ID NO: 189094 - DNA, 11 bp, Unknown
  misc_feature (1)..( 11): Result.005 file - promoters50/4767871
tagcaatagtg

SEQ ID NO: 189095 - DNA, 11 bp, Unknown
  misc_feature (1)..( 11): Result.005 file - promoters50/4767871
ttacaagagtg

SEQ ID NO: 189096 - DNA, 11 bp, Unknown
  misc_feature (1)..( 11): Result.005 file - promoters50/4767871
gatcaaaagta

SEQ ID NO: 189097 - DNA, 10 bp, Unknown
  misc_feature (1)..( 10): Result.005 file - promoters50/4767871
aaatttaatt

SEQ ID NO: 189098 - DNA, 10 bp, Unknown
  misc_feature (1)..( 10): Result.005 file - promoters50/4767871
caatctaact

SEQ ID NO: 189099 - DNA, 10 bp, Unknown
  misc_feature (1)..( 10): Result.005 file - promoters50/4767871
aaagttaatt

SEQ ID NO: 189100 - DNA, 10 bp, Unknown
  misc_feature (1)..( 10): Result.005 file - promoters50/4767871
gaatataatt

SEQ ID NO: 189101 - DNA, 9 bp, Unknown
  misc_feature (1)..( 9): Result.005 file - promoters50/4767871
ttatttatt

SEQ ID NO: 189102 - DNA, 9 bp, Unknown
  misc_feature (1)..( 9): Result.005 file - promoters50/4767871
ttatttaaa

SEQ ID NO: 189103 - DNA, 9 bp, Unknown
  misc_feature (1)..( 9): Result.005 file - promoters50/4767871
gaattaaaa

SEQ ID NO: 189104 - DNA, 9 bp, Unknown
  misc_feature (1)..( 9): Result.005 file - promoters50/4767871
atatataac

SEQ ID NO: 189105 - DNA, 8 bp, Unknown
  misc_feature (1)..( 8): Result.005 file - promoters50/4767871
ctttttta

SEQ ID NO: 189106 - DNA, 8 bp, Unknown
  misc_feature (1)..( 8): Result.005 file - promoters50/4767871
ttttgtta

SEQ ID NO: 189107 - DNA, 8 bp, Unknown
  misc_feature (1)..( 8): Result.005 file - promoters50/4767871
ctttttgt

SEQ ID NO: 189108 - DNA, 8 bp, Unknown
  misc_feature (1)..( 8): Result.005 file - promoters50/4767871
ttttctgt

SEQ ID NO: 189109 - DNA, 12 bp, Unknown
  misc_feature (1)..( 12): Result.005 file - promoters50/4767871
atttaaacattt

SEQ ID NO: 189110 - DNA, 12 bp, Unknown
  misc_feature (1)..( 12): Result.005 file - promoters50/4767871
taataaacattt

SEQ ID NO: 189111 - DNA, 12 bp, Unknown
  misc_feature (1)..( 12): Result.005 file - promoters50/4767871
gaataaacttat

SEQ ID NO: 189112 - DNA, 12 bp, Unknown
  misc_feature (1)..( 12): Result.005 file - promoters50/4767871
gaagaaattatg

SEQ ID NO: 189113 - DNA, 13 bp, Unknown
  misc_feature (1)..( 13): Result.005 file - promoters50/4767877
tgtgaagattaga

SEQ ID NO: 189114 - DNA, 13 bp, Unknown
  misc_feature (1)..( 13): Result.005 file - promoters50/4767877
aatgaaaatttgt

SEQ ID NO: 189115 - DNA, 13 bp, Unknown
  misc_feature (1)..( 13): Result.005 file - promoters50/4767877
tgtcaagctccga

SEQ ID NO: 189116 - DNA, 13 bp, Unknown
  misc_feature (1)..( 13): Result.005 file - promoters50/4767877
ctttacaattaaa

SEQ ID NO: 189117 - DNA, 14 bp, Unknown
  misc_feature (1)..( 14): Result.005 file - promoters50/4767884
ttctacatagtttc

SEQ ID NO: 189118 - DNA, 14 bp, Unknown
  misc_feature (1)..( 14): Result.005 file - promoters50/4767884
tagaatatactttc

SEQ ID NO: 189119 - DNA, 13 bp, Unknown
  misc_feature (1)..( 13): Result.005 file - promoters50/4767884
ttaatatacgttc

SEQ ID NO: 189120 - DNA, 13 bp, Unknown
  misc_feature (1)..( 13): Result.005 file - promoters50/4767884
ttaaaatattcga

SEQ ID NO: 189121 - DNA, 13 bp, Unknown
  misc_feature (1)..( 13): Result.005 file - promoters50/4767884
gtaaaattagata

SEQ ID NO: 189122 - DNA, 14 bp, Unknown
  misc_feature (1)..( 14): Result.005 file - promoters50/4767884
acaaagatttgagg

SEQ ID NO: 189123 - DNA, 12 bp, Unknown
  misc_feature (1)..( 12): Result.005 file - promoters50/4767884
taacccaaaaag

SEQ ID NO: 189124 - DNA, 12 bp, Unknown
  misc_feature (1)..( 12): Result.005 file - promoters50/4767884
taatccaaaata

SEQ ID NO: 189125 - DNA, 13 bp, Unknown
  misc_feature (1)..( 13): Result.005 file - promoters50/4767884
gcaaacaacaaga

SEQ ID NO: 189126 - DNA, 13 bp, Unknown
  misc_feature (1)..( 13): Result.005 file - promoters50/4767884
taacccgaaccgg

SEQ ID NO: 189127 - DNA, 13 bp, Unknown
  misc_feature (1)..( 13): Result.005 file - promoters50/4767884
cttatcaagatag

SEQ ID NO: 189128 - DNA, 13 bp, Unknown
  misc_feature (1)..( 13): Result.005 file - promoters50/4767884
cgcttcagaaagg

SEQ ID NO: 189129 - DNA, 11 bp, Unknown
  misc_feature (1)..( 11): Result.005 file - promoters50/4767884
aaaaagaatta

SEQ ID NO: 189130 - DNA, 11 bp, Unknown
  misc_feature (1)..( 11): Result.005 file - promoters50/4767884
taaaataataa

SEQ ID NO: 189131 - DNA, 12 bp, Unknown
  misc_feature (1)..( 12): Result.005 file - promoters50/4767884
caacaagatttc

SEQ ID NO: 189132 - DNA, 12 bp, Unknown
  misc_feature (1)..( 12): Result.005 file - promoters50/4767884
agaaaggaacta

SEQ ID NO: 189133 - DNA, 12 bp, Unknown
  misc_feature (1)..( 12): Result.005 file - promoters50/4767884
cataaaatctgg

SEQ ID NO: 189134 - DNA, 12 bp, Unknown
  misc_feature (1)..( 12): Result.005 file - promoters50/4767884
tatcaagatagg

SEQ ID NO: 189135 - DNA, 12 bp, Unknown
  misc_feature (1)..( 12): Result.005 file - promoters50/4767892
acttacaaaaac

SEQ ID NO: 189136 - DNA, 12 bp, Unknown
  misc_feature (1)..( 12): Result.005 file - promoters50/4767892
tattacgaaaac

SEQ ID NO: 189137 - DNA, 12 bp, Unknown
  misc_feature (1)..( 12): Result.005 file - promoters50/4767892
taatactaaata

SEQ ID NO: 189138 - DNA, 12 bp, Unknown
  misc_feature (1)..( 12): Result.005 file - promoters50/4767892
tattataaagtt

SEQ ID NO: 189139 - DNA, 12 bp, Unknown
  misc_feature (1)..( 12): Result.005 file - promoters50/4767892
gaatactaatcc

SEQ ID NO: 189140 - DNA, 12 bp, Unknown
  misc_feature (1)..( 12): Result.005 file - promoters50/4767892
ctatataaatta

SEQ ID NO: 189141 - DNA, 12 bp, Unknown
  misc_feature (1)..( 12): Result.005 file - promoters50/4767892
tcatataatatt

SEQ ID NO: 189142 - DNA, 9 bp, Unknown
  misc_feature (1)..( 9): Result.005 file - promoters50/4767892
tcgtatact

SEQ ID NO: 189143 - DNA, 9 bp, Unknown
  misc_feature (1)..( 9): Result.005 file - promoters50/4767892
atgtaaact

SEQ ID NO: 189144 - DNA, 9 bp, Unknown
  misc_feature (1)..( 9): Result.005 file - promoters50/4767892
ttgttaaca

SEQ ID NO: 189145 - DNA, 9 bp, Unknown
  misc_feature (1)..( 9): Result.005 file - promoters50/4767892
ttgtcaacc

SEQ ID NO: 189146 - DNA, 9 bp, Unknown
  misc_feature (1)..( 9): Result.005 file - promoters50/4767892
ttgttatgg

SEQ ID NO: 189147 - DNA, 9 bp, Unknown
  misc_feature (1)..( 9): Result.005 file - promoters50/4767892
ttggtatga

SEQ ID NO: 189148 - DNA, 7 bp, Unknown
  misc_feature (1)..( 7): Result.005 file - promoters50/4767929
ttgatct

SEQ ID NO: 189149 - DNA, 7 bp, Unknown
  misc_feature (1)..( 7): Result.005 file - promoters50/4767929
ttgatca

SEQ ID NO: 189150 - DNA, 7 bp, Unknown
  misc_feature (1)..( 7): Result.005 file - promoters50/4767929
ctgatca

SEQ ID NO: 189151 - DNA, 7 bp, Unknown
  misc_feature (1)..( 7): Result.005 file - promoters50/4767929
atttgtt

SEQ ID NO: 189152 - DNA, 7 bp, Unknown
  misc_feature (1)..( 7): Result.005 file - promoters50/4767929
atttgtg

SEQ ID NO: 189153 - DNA, 7 bp, Unknown
  misc_feature (1)..( 7): Result.005 file - promoters50/4767929
ttttgtt

SEQ ID NO: 189154 - DNA, 9 bp, Unknown
  misc_feature (1)..( 9): Result.005 file - promoters50/4767929
ttaataaca

SEQ ID NO: 189155 - DNA, 9 bp, Unknown
  misc_feature (1)..( 9): Result.005 file - promoters50/4767929
gtaaaaaca

SEQ ID NO: 189156 - DNA, 9 bp, Unknown
  misc_feature (1)..( 9): Result.005 file - promoters50/4767929
ttaatatag

SEQ ID NO: 189157 - DNA, 8 bp, Unknown
  misc_feature (1)..( 8): Result.005 file - promoters50/4767929
tctcagtg

SEQ ID NO: 189158 - DNA, 8 bp, Unknown
  misc_feature (1)..( 8): Result.005 file - promoters50/4767929
tcttagtg

SEQ ID NO: 189159 - DNA, 8 bp, Unknown
  misc_feature (1)..( 8): Result.005 file - promoters50/4767929
tctaagta

SEQ ID NO: 189160 - DNA, 8 bp, Unknown
  misc_feature (1)..( 8): Result.005 file - promoters50/4767929
tttcaaga

SEQ ID NO: 189161 - DNA, 8 bp, Unknown
  misc_feature (1)..( 8): Result.005 file - promoters50/4767929
tttcaatt

SEQ ID NO: 189162 - DNA, 8 bp, Unknown
  misc_feature (1)..( 8): Result.005 file - promoters50/4767929
gttcaatt

SEQ ID NO: 189163 - DNA, 8 bp, Unknown
  misc_feature (1)..( 8): Result.005 file - promoters50/4767933
atcgaaaa

SEQ ID NO: 189164 - DNA, 8 bp, Unknown
  misc_feature (1)..( 8): Result.005 file - promoters50/4767933
atccaaaa

SEQ ID NO: 189165 - DNA, 8 bp, Unknown
  misc_feature (1)..( 8): Result.005 file - promoters50/4767933
atccaaat

SEQ ID NO: 189166 - DNA, 7 bp, Unknown
  misc_feature (1)..( 7): Result.005 file - promoters50/4767933
tcctttt

SEQ ID NO: 189167 - DNA, 7 bp, Unknown
  misc_feature (1)..( 7): Result.005 file - promoters50/4767933
tccttta

SEQ ID NO: 189168 - DNA, 7 bp, Unknown
  misc_feature (1)..( 7): Result.005 file - promoters50/4767933
tccatta

SEQ ID NO: 189169 - DNA, 10 bp, Unknown
  misc_feature (1)..( 10): Result.005 file - promoters50/4767933
ttacaaatta

SEQ ID NO: 189170 - DNA, 10 bp, Unknown
  misc_feature (1)..( 10): Result.005 file - promoters50/4767933
ttaaaaactc

SEQ ID NO: 189171 - DNA, 10 bp, Unknown
  misc_feature (1)..( 10): Result.005 file - promoters50/4767933
gaaaaaactc

SEQ ID NO: 189172 - DNA, 10 bp, Unknown
  misc_feature (1)..( 10): Result.005 file - promoters50/4767933
aaattgaaac

SEQ ID NO: 189173 - DNA, 10 bp, Unknown
  misc_feature (1)..( 10): Result.005 file - promoters50/4767933
ccgttgaaaa

SEQ ID NO: 189174 - DNA, 10 bp, Unknown
  misc_feature (1)..( 10): Result.005 file - promoters50/4767933
aaatggaaac

SEQ ID NO: 189175 - DNA, 10 bp, Unknown
  misc_feature (1)..( 10): Result.005 file - promoters50/4767948
gtatacaaaa

SEQ ID NO: 189176 - DNA, 10 bp, Unknown
  misc_feature (1)..( 10): Result.005 file - promoters50/4767948
atatacgaaa

SEQ ID NO: 189177 - DNA, 10 bp, Unknown
  misc_feature (1)..( 10): Result.005 file - promoters50/4767948
gtaaacaaaa

SEQ ID NO: 189178 - DNA, 9 bp, Unknown
  misc_feature (1)..( 9): Result.005 file - promoters50/4767952
aattaaatt

SEQ ID NO: 189179 - DNA, 9 bp, Unknown
  misc_feature (1)..( 9): Result.005 file - promoters50/4767952
ttttacatt

SEQ ID NO: 189180 - DNA, 9 bp, Unknown
  misc_feature (1)..( 9): Result.005 file - promoters50/4767952
tattaaatg

SEQ ID NO: 189181 - DNA, 9 bp, Unknown
  misc_feature (1)..( 9): Result.005 file - promoters50/4767952
tattaaatg

SEQ ID NO: 189182 - DNA, 9 bp, Unknown
  misc_feature (1)..( 9): Result.005 file - promoters50/4767952
aatgaaacg

SEQ ID NO: 189183 - DNA, 9 bp, Unknown
  misc_feature (1)..( 9): Result.005 file - promoters50/4767952
tttgacata

SEQ ID NO: 189184 - DNA, 9 bp, Unknown
  misc_feature (1)..( 9): Result.005 file - promoters50/4767952
agatcaatt

SEQ ID NO: 189185 - DNA, 9 bp, Unknown
  misc_feature (1)..( 9): Result.005 file - promoters50/4767952
ggatcaaag

SEQ ID NO: 189186 - DNA, 9 bp, Unknown
  misc_feature (1)..( 9): Result.005 file - promoters50/4767952
agaccaaaa

SEQ ID NO: 189187 - DNA, 9 bp, Unknown
  misc_feature (1)..( 9): Result.005 file - promoters50/4767952
ttatcgatt

SEQ ID NO: 189188 - DNA, 9 bp, Unknown
  misc_feature (1)..( 9): Result.005 file - promoters50/4767952
gaatcaaat

SEQ ID NO: 189189 - DNA, 9 bp, Unknown
  misc_feature (1)..( 9): Result.005 file - promoters50/4767952
aaatcaaaa

SEQ ID NO: 189190 - DNA, 11 bp, Unknown
  misc_feature (1)..( 11): Result.005 file - promoters50/4767956
aaaacataatt

SEQ ID NO: 189191 - DNA, 11 bp, Unknown
  misc_feature (1)..( 11): Result.005 file - promoters50/4767956
tgaacttaatt

SEQ ID NO: 189192 - DNA, 11 bp, Unknown
  misc_feature (1)..( 11): Result.005 file - promoters50/4767956
caaacatatcc

SEQ ID NO: 189193 - DNA, 11 bp, Unknown
  misc_feature (1)..( 11): Result.005 file - promoters50/4767956
caaccattcag

SEQ ID NO: 189194 - DNA, 9 bp, Unknown
  misc_feature (1)..( 9): Result.005 file - promoters50/4767956
caaacaaag

SEQ ID NO: 189195 - DNA, 9 bp, Unknown
  misc_feature (1)..( 9): Result.005 file - promoters50/4767956
gaaaaaaat

SEQ ID NO: 189196 - DNA, 9 bp, Unknown
  misc_feature (1)..( 9): Result.005 file - promoters50/4767956
caaacatat

SEQ ID NO: 189197 - DNA, 9 bp, Unknown
  misc_feature (1)..( 9): Result.005 file - promoters50/4767956
gaaggaaaa

SEQ ID NO: 189198 - DNA, 7 bp, Unknown
  misc_feature (1)..( 7): Result.005 file - promoters50/4767960
actttga

SEQ ID NO: 189199 - DNA, 7 bp, Unknown
  misc_feature (1)..( 7): Result.005 file - promoters50/4767960
tctttga

SEQ ID NO: 189200 - DNA, 7 bp, Unknown
  misc_feature (1)..( 7): Result.005 file - promoters50/4767960
tctttgg

SEQ ID NO: 189201 - DNA, 8 bp, Unknown
  misc_feature (1)..( 8): Result.005 file - promoters50/4767960
tcaacaaa

SEQ ID NO: 189202 - DNA, 8 bp, Unknown
  misc_feature (1)..( 8): Result.005 file - promoters50/4767960
tcatcaat

SEQ ID NO: 189203 - DNA, 8 bp, Unknown
  misc_feature (1)..( 8): Result.005 file - promoters50/4767960
acaagaaa

SEQ ID NO: 189204 - DNA, 8 bp, Unknown
  misc_feature (1)..( 8): Result.005 file - promoters50/4767960
tcatcaag

SEQ ID NO: 189205 - DNA, 7 bp, Unknown
  misc_feature (1)..( 7): Result.005 file - promoters50/4767960
gcagaat

SEQ ID NO: 189206 - DNA, 7 bp, Unknown
  misc_feature (1)..( 7): Result.005 file - promoters50/4767960
tcagaat

SEQ ID NO: 189207 - DNA, 7 bp, Unknown
  misc_feature (1)..( 7): Result.005 file - promoters50/4767960
gcagaat

SEQ ID NO: 189208 - DNA, 7 bp, Unknown
  misc_feature (1)..( 7): Result.005 file - promoters50/4767972
taaaatt

SEQ ID NO: 189209 - DNA, 7 bp, Unknown
  misc_feature (1)..( 7): Result.005 file - promoters50/4767972
taaaatc

SEQ ID NO: 189210 - DNA, 7 bp, Unknown
  misc_feature (1)..( 7): Result.005 file - promoters50/4767972
aaaaatc

SEQ ID NO: 189211 - DNA, 7 bp, Unknown
  misc_feature (1)..( 7): Result.005 file - promoters50/4767972
aaaaatg

SEQ ID NO: 189212 - DNA, 10 bp, Unknown
  misc_feature (1)..( 10): Result.005 file - promoters50/4767972
gaaaatgatt

SEQ ID NO: 189213 - DNA, 10 bp, Unknown
  misc_feature (1)..( 10): Result.005 file - promoters50/4767972
gtaaataatt

SEQ ID NO: 189214 - DNA, 10 bp, Unknown
  misc_feature (1)..( 10): Result.005 file - promoters50/4767972
gaaaatgaaa

SEQ ID NO: 189215 - DNA, 10 bp, Unknown
  misc_feature (1)..( 10): Result.005 file - promoters50/4767972
caaaaaaatt

SEQ ID NO: 189216 - DNA, 10 bp, Unknown
  misc_feature (1)..( 10): Result.005 file - promoters50/4767972
tgaaacgaat

SEQ ID NO: 189217 - DNA, 13 bp, Unknown
  misc_feature (1)..( 13): Result.005 file - promoters50/4767972
aacaaaaatattt

SEQ ID NO: 189218 - DNA, 13 bp, Unknown
  misc_feature (1)..( 13): Result.005 file - promoters50/4767972
taaaaaaagattt

SEQ ID NO: 189219 - DNA, 13 bp, Unknown
  misc_feature (1)..( 13): Result.005 file - promoters50/4767972
aacaaaaataatc

SEQ ID NO: 189220 - DNA, 13 bp, Unknown
  misc_feature (1)..( 13): Result.005 file - promoters50/4767972
agaaaaaattgtt

SEQ ID NO: 189221 - DNA, 15 bp, Unknown
  misc_feature (1)..( 15): Result.005 file - promoters50/4767972
tatttagaatatctt

SEQ ID NO: 189222 - DNA, 15 bp, Unknown
  misc_feature (1)..( 15): Result.005 file - promoters50/4767972
tatttaaaataatat

SEQ ID NO: 189223 - DNA, 15 bp, Unknown
  misc_feature (1)..( 15): Result.005 file - promoters50/4767972
tatttattggttatt

SEQ ID NO: 189224 - DNA, 15 bp, Unknown
  misc_feature (1)..( 15): Result.005 file - promoters50/4767972
actcgaaaatataca

SEQ ID NO: 189225 - DNA, 15 bp, Unknown
  misc_feature (1)..( 15): Result.005 file - promoters50/4767972
gcgggaagataaaca

SEQ ID NO: 189226 - DNA, 12 bp, Unknown
  misc_feature (1)..( 12): Result.005 file - promoters50/4767972
tcttataatatt

SEQ ID NO: 189227 - DNA, 12 bp, Unknown
  misc_feature (1)..( 12): Result.005 file - promoters50/4767972
taaaataatata

SEQ ID NO: 189228 - DNA, 12 bp, Unknown
  misc_feature (1)..( 12): Result.005 file - promoters50/4767972
ttatgtaatatt

SEQ ID NO: 189229 - DNA, 12 bp, Unknown
  misc_feature (1)..( 12): Result.005 file - promoters50/4767972
ctcgaaaatata

SEQ ID NO: 189230 - DNA, 12 bp, Unknown
  misc_feature (1)..( 12): Result.005 file - promoters50/4767972
gaagataaacat

SEQ ID NO: 189231 - DNA, 10 bp, Unknown
  misc_feature (1)..( 10): Result.005 file - promoters50/4767972
atgaagaatc

SEQ ID NO: 189232 - DNA, 10 bp, Unknown
  misc_feature (1)..( 10): Result.005 file - promoters50/4767972
aagaaaaata

SEQ ID NO: 189233 - DNA, 10 bp, Unknown
  misc_feature (1)..( 10): Result.005 file - promoters50/4767972
gaaaacaatt

SEQ ID NO: 189234 - DNA, 10 bp, Unknown
  misc_feature (1)..( 10): Result.005 file - promoters50/4767972
aagaaaaaga

SEQ ID NO: 189235 - DNA, 10 bp, Unknown
  misc_feature (1)..( 10): Result.005 file - promoters50/4767972
ttcctaattt

SEQ ID NO: 189236 - DNA, 10 bp, Unknown
  misc_feature (1)..( 10): Result.005 file - promoters50/4767972
ttcgtaatta

SEQ ID NO: 189237 - DNA, 10 bp, Unknown
  misc_feature (1)..( 10): Result.005 file - promoters50/4767972
taactatttt

SEQ ID NO: 189238 - DNA, 10 bp, Unknown
  misc_feature (1)..( 10): Result.005 file - promoters50/4767972
aacttatttt

SEQ ID NO: 189239 - DNA, 8 bp, Unknown
  misc_feature (1)..( 8): Result.005 file - promoters50/4767976
tttcaata

SEQ ID NO: 189240 - DNA, 8 bp, Unknown
  misc_feature (1)..( 8): Result.005 file - promoters50/4767976
ttttaatt

SEQ ID NO: 189241 - DNA, 8 bp, Unknown
  misc_feature (1)..( 8): Result.005 file - promoters50/4767976
gcttaatt

SEQ ID NO: 189242 - DNA, 11 bp, Unknown
  misc_feature (1)..( 11): Result.005 file - promoters50/4767976
tgtattaactt

SEQ ID NO: 189243 - DNA, 11 bp, Unknown
  misc_feature (1)..( 11): Result.005 file - promoters50/4767976
tgtgttaataa

SEQ ID NO: 189244 - DNA, 11 bp, Unknown
  misc_feature (1)..( 11): Result.005 file - promoters50/4767976
cgaatttactt

SEQ ID NO: 189245 - DNA, 8 bp, Unknown
  misc_feature (1)..( 8): Result.005 file - promoters50/4767976
tcaaatat

SEQ ID NO: 189246 - DNA, 8 bp, Unknown
  misc_feature (1)..( 8): Result.005 file - promoters50/4767976
tcaaatca

SEQ ID NO: 189247 - DNA, 8 bp, Unknown
  misc_feature (1)..( 8): Result.005 file - promoters50/4767976
tcatatca

SEQ ID NO: 189248 - DNA, 9 bp, Unknown
  misc_feature (1)..( 9): Result.005 file - promoters50/4767978
ttggtaaag

SEQ ID NO: 189249 - DNA, 9 bp, Unknown
  misc_feature (1)..( 9): Result.005 file - promoters50/4767978
ttggtaaat

SEQ ID NO: 189250 - DNA, 9 bp, Unknown
  misc_feature (1)..( 9): Result.005 file - promoters50/4767978
ttggaaaaa

SEQ ID NO: 189251 - DNA, 9 bp, Unknown
  misc_feature (1)..( 9): Result.005 file - promoters50/4767978
ttggaaagt

SEQ ID NO: 189252 - DNA, 9 bp, Unknown
  misc_feature (1)..( 9): Result.005 file - promoters50/4767978
atggtaaga

SEQ ID NO: 189253 - DNA, 9 bp, Unknown
  misc_feature (1)..( 9): Result.005 file - promoters50/4767978
ttggaaaga

SEQ ID NO: 189254 - DNA, 8 bp, Unknown
  misc_feature (1)..( 8): Result.005 file - promoters50/4767990
gtaatttg

SEQ ID NO: 189255 - DNA, 8 bp, Unknown
  misc_feature (1)..( 8): Result.005 file - promoters50/4767990
caaatttg

SEQ ID NO: 189256 - DNA, 8 bp, Unknown
  misc_feature (1)..( 8): Result.005 file - promoters50/4767990
caaagttg

SEQ ID NO: 189257 - DNA, 8 bp, Unknown
  misc_feature (1)..( 8): Result.005 file - promoters50/4768000
ctcaattt

SEQ ID NO: 189258 - DNA, 8 bp, Unknown
  misc_feature (1)..( 8): Result.005 file - promoters50/4768000
ctcaattc

SEQ ID NO: 189259 - DNA, 8 bp, Unknown
  misc_feature (1)..( 8): Result.005 file - promoters50/4768000
cacaattt

SEQ ID NO: 189260 - DNA, 9 bp, Unknown
  misc_feature (1)..( 9): Result.005 file - promoters50/4768000
taattgaaa

SEQ ID NO: 189261 - DNA, 9 bp, Unknown
  misc_feature (1)..( 9): Result.005 file - promoters50/4768000
taattcaaa

SEQ ID NO: 189262 - DNA, 9 bp, Unknown
  misc_feature (1)..( 9): Result.005 file - promoters50/4768000
taatggaac

SEQ ID NO: 189263 - DNA, 7 bp, Unknown
  misc_feature (1)..( 7): Result.005 file - promoters50/4768000
ttagtta

SEQ ID NO: 189264 - DNA, 7 bp, Unknown
  misc_feature (1)..( 7): Result.005 file - promoters50/4768000
ttattta

SEQ ID NO: 189265 - DNA, 7 bp, Unknown
  misc_feature (1)..( 7): Result.005 file - promoters50/4768000
ttatttt

SEQ ID NO: 189266 - DNA, 7 bp, Unknown
  misc_feature (1)..( 7): Result.005 file - promoters50/4768000
ttagttt

SEQ ID NO: 189267 - DNA, 7 bp, Unknown
  misc_feature (1)..( 7): Result.005 file - promoters50/4768000
ttatttt

SEQ ID NO: 189268 - DNA, 7 bp, Unknown
  misc_feature (1)..( 7): Result.005 file - promoters50/4768000
ttattta

SEQ ID NO: 189269 - DNA, 10 bp, Unknown
  misc_feature (1)..( 10): Result.005 file - promoters50/4768000
tttttttatc

SEQ ID NO: 189270 - DNA, 10 bp, Unknown
  misc_feature (1)..( 10): Result.005 file - promoters50/4768000
tttttttaaa

SEQ ID NO: 189271 - DNA, 10 bp, Unknown
  misc_feature (1)..( 10): Result.005 file - promoters50/4768000
tcttttgaaa

SEQ ID NO: 189272 - DNA, 7 bp, Unknown
  misc_feature (1)..( 7): Result.005 file - promoters50/4768000
ttaaatt

SEQ ID NO: 189273 - DNA, 7 bp, Unknown
  misc_feature (1)..( 7): Result.005 file - promoters50/4768000
ttacatt

SEQ ID NO: 189274 - DNA, 7 bp, Unknown
  misc_feature (1)..( 7): Result.005 file - promoters50/4768000
ttacatc

SEQ ID NO: 189275 - DNA, 15 bp, Unknown
  misc_feature (1)..( 15): Result.005 file - promoters50/4768007
aaagaaaataataat

SEQ ID NO: 189276 - DNA, 15 bp, Unknown
  misc_feature (1)..( 15): Result.005 file - promoters50/4768007
aaaaaaaataagaat

SEQ ID NO: 189277 - DNA, 15 bp, Unknown
  misc_feature (1)..( 15): Result.005 file - promoters50/4768007
tttaaaaatactata

SEQ ID NO: 189278 - DNA, 15 bp, Unknown
  misc_feature (1)..( 15): Result.005 file - promoters50/4768007
tgtttgtataataaa

SEQ ID NO: 189279 - DNA, 15 bp, Unknown
  misc_feature (1)..( 15): Result.005 file - promoters50/4768007
ctaaattttaataaa

SEQ ID NO: 189280 - DNA, 15 bp, Unknown
  misc_feature (1)..( 15): Result.005 file - promoters50/4768007
aaacaacccaagaat

SEQ ID NO: 189281 - DNA, 15 bp, Unknown
  misc_feature (1)..( 15): Result.005 file - promoters50/4768007
gagatagataagacg

SEQ ID NO: 189282 - DNA, 10 bp, Unknown
  misc_feature (1)..( 10): Result.005 file - promoters50/4768007
ctttccacac

SEQ ID NO: 189283 - DNA, 10 bp, Unknown
  misc_feature (1)..( 10): Result.005 file - promoters50/4768007
ctttccatct

SEQ ID NO: 189284 - DNA, 10 bp, Unknown
  misc_feature (1)..( 10): Result.005 file - promoters50/4768007
ctttcctctc

SEQ ID NO: 189285 - DNA, 10 bp, Unknown
  misc_feature (1)..( 10): Result.005 file - promoters50/4768007
gtttccttct

SEQ ID NO: 189286 - DNA, 10 bp, Unknown
  misc_feature (1)..( 10): Result.005 file - promoters50/4768007
cattccatta

SEQ ID NO: 189287 - DNA, 10 bp, Unknown
  misc_feature (1)..( 10): Result.005 file - promoters50/4768007
ggttcctttg

SEQ ID NO: 189288 - DNA, 10 bp, Unknown
  misc_feature (1)..( 10): Result.005 file - promoters50/4768007
ctatatatag

SEQ ID NO: 189289 - DNA, 10 bp, Unknown
  misc_feature (1)..( 10): Result.005 file - promoters50/4768007
ttatatatag

SEQ ID NO: 189290 - DNA, 10 bp, Unknown
  misc_feature (1)..( 10): Result.005 file - promoters50/4768007
atatataaat

SEQ ID NO: 189291 - DNA, 10 bp, Unknown
  misc_feature (1)..( 10): Result.005 file - promoters50/4768007
ctatatataa

SEQ ID NO: 189292 - DNA, 10 bp, Unknown
  misc_feature (1)..( 10): Result.005 file - promoters50/4768007
ttatatcttt

SEQ ID NO: 189293 - DNA, 10 bp, Unknown
  misc_feature (1)..( 10): Result.005 file - promoters50/4768007
ttatatcttc

SEQ ID NO: 189294 - DNA, 15 bp, Unknown
  misc_feature (1)..( 15): Result.005 file - promoters50/4768007
atccaaataaaatat

SEQ ID NO: 189295 - DNA, 15 bp, Unknown
  misc_feature (1)..( 15): Result.005 file - promoters50/4768007
ttcgtaataaaaaac

SEQ ID NO: 189296 - DNA, 15 bp, Unknown
  misc_feature (1)..( 15): Result.005 file - promoters50/4768007
agcgaaacaaaaaaa

SEQ ID NO: 189297 - DNA, 15 bp, Unknown
  misc_feature (1)..( 15): Result.005 file - promoters50/4768007
atttctttaaactat

SEQ ID NO: 189298 - DNA, 15 bp, Unknown
  misc_feature (1)..( 15): Result.005 file - promoters50/4768007
tgtttaacaaaaaaa

SEQ ID NO: 189299 - DNA, 15 bp, Unknown
  misc_feature (1)..( 15): Result.005 file - promoters50/4768007
tgtttcacatatagt

SEQ ID NO: 189300 - DNA, 15 bp, Unknown
  misc_feature (1)..( 15): Result.005 file - promoters50/4768007
ttcttaatctagtcg

SEQ ID NO: 189301 - DNA, 15 bp, Unknown
  misc_feature (1)..( 15): Result.005 file - promoters50/4768007
aaagaaacaagaaag

SEQ ID NO: 189302 - DNA, 10 bp, Unknown
  misc_feature (1)..( 10): Result.005 file - promoters50/4768007
aaataaaagc

SEQ ID NO: 189303 - DNA, 10 bp, Unknown
  misc_feature (1)..( 10): Result.005 file - promoters50/4768007
atataaaaaa

SEQ ID NO: 189304 - DNA, 10 bp, Unknown
  misc_feature (1)..( 10): Result.005 file - promoters50/4768007
caataaaatt

SEQ ID NO: 189305 - DNA, 10 bp, Unknown
  misc_feature (1)..( 10): Result.005 file - promoters50/4768007
gtatcaaaca

SEQ ID NO: 189306 - DNA, 10 bp, Unknown
  misc_feature (1)..( 10): Result.005 file - promoters50/4768007
atatgaaact

SEQ ID NO: 189307 - DNA, 10 bp, Unknown
  misc_feature (1)..( 10): Result.005 file - promoters50/4768007
agataatatt

SEQ ID NO: 189308 - DNA, 8 bp, Unknown
  misc_feature (1)..( 8): Result.005 file - promoters50/4768011
taatacaa

SEQ ID NO: 189309 - DNA, 8 bp, Unknown
  misc_feature (1)..( 8): Result.005 file - promoters50/4768011
taaaacaa

SEQ ID NO: 189310 - DNA, 8 bp, Unknown
  misc_feature (1)..( 8): Result.005 file - promoters50/4768011
aaatccaa

SEQ ID NO: 189311 - DNA, 11 bp, Unknown
  misc_feature (1)..( 11): Result.005 file - promoters50/4768011
aaaatcagtaa

SEQ ID NO: 189312 - DNA, 11 bp, Unknown
  misc_feature (1)..( 11): Result.005 file - promoters50/4768011
attagcagtaa

SEQ ID NO: 189313 - DNA, 11 bp, Unknown
  misc_feature (1)..( 11): Result.005 file - promoters50/4768011
aaaatccgtat

SEQ ID NO: 189314 - DNA, 8 bp, Unknown
  misc_feature (1)..( 8): Result.005 file - promoters50/4768011
caaatatt

SEQ ID NO: 189315 - DNA, 8 bp, Unknown
  misc_feature (1)..( 8): Result.005 file - promoters50/4768011
tgaatatt

SEQ ID NO: 189316 - DNA, 8 bp, Unknown
  misc_feature (1)..( 8): Result.005 file - promoters50/4768011
tgaatatg

SEQ ID NO: 189317 - DNA, 10 bp, Unknown
  misc_feature (1)..( 10): Result.005 file - promoters50/4768011
ccacaaaaca

SEQ ID NO: 189318 - DNA, 10 bp, Unknown
  misc_feature (1)..( 10): Result.005 file - promoters50/4768011
gtacaaaata

SEQ ID NO: 189319 - DNA, 10 bp, Unknown
  misc_feature (1)..( 10): Result.005 file - promoters50/4768011
gtaccaaata

SEQ ID NO: 189320 - DNA, 9 bp, Unknown
  misc_feature (1)..( 9): Result.005 file - promoters50/4768011
ttttttaat

SEQ ID NO: 189321 - DNA, 9 bp, Unknown
  misc_feature (1)..( 9): Result.005 file - promoters50/4768011
gatttaaat

SEQ ID NO: 189322 - DNA, 9 bp, Unknown
  misc_feature (1)..( 9): Result.005 file - promoters50/4768011
aattgaaaa

SEQ ID NO: 189323 - DNA, 9 bp, Unknown
  misc_feature (1)..( 9): Result.005 file - promoters50/4768011
aattcaaat

SEQ ID NO: 189324 - DNA, 8 bp, Unknown
  misc_feature (1)..( 8): Result.005 file - promoters50/4768011
gtttccac

SEQ ID NO: 189325 - DNA, 8 bp, Unknown
  misc_feature (1)..( 8): Result.005 file - promoters50/4768011
atttccaa

SEQ ID NO: 189326 - DNA, 8 bp, Unknown
  misc_feature (1)..( 8): Result.005 file - promoters50/4768011
attttcaa

SEQ ID NO: 189327 - DNA, 12 bp, Unknown
  misc_feature (1)..( 12): Result.005 file - promoters50/4768011
ccacaaaacaaa

SEQ ID NO: 189328 - DNA, 12 bp, Unknown
  misc_feature (1)..( 12): Result.005 file - promoters50/4768011
gtaccaaataaa

SEQ ID NO: 189329 - DNA, 12 bp, Unknown
  misc_feature (1)..( 12): Result.005 file - promoters50/4768011
gtacaaaatata

SEQ ID NO: 189330 - DNA, 11 bp, Unknown
  misc_feature (1)..( 11): Result.005 file - promoters50/4768011
aatagattttt

SEQ ID NO: 189331 - DNA, 11 bp, Unknown
  misc_feature (1)..( 11): Result.005 file - promoters50/4768011
tttagactttt

SEQ ID NO: 189332 - DNA, 11 bp, Unknown
  misc_feature (1)..( 11): Result.005 file - promoters50/4768011
tttagacacga

SEQ ID NO: 189333 - DNA, 11 bp, Unknown
  misc_feature (1)..( 11): Result.005 file - promoters50/4768027
aaaagcttgtt

SEQ ID NO: 189334 - DNA, 11 bp, Unknown
  misc_feature (1)..( 11): Result.005 file - promoters50/4768027
aaaaccttagt

SEQ ID NO: 189335 - DNA, 11 bp, Unknown
  misc_feature (1)..( 11): Result.005 file - promoters50/4768027
gaaagattgtt

SEQ ID NO: 189336 - DNA, 8 bp, Unknown
  misc_feature (1)..( 8): Result.005 file - promoters50/4768027
gtttattc

SEQ ID NO: 189337 - DNA, 8 bp, Unknown
  misc_feature (1)..( 8): Result.005 file - promoters50/4768027
gttaatta

SEQ ID NO: 189338 - DNA, 8 bp, Unknown
  misc_feature (1)..( 8): Result.005 file - promoters50/4768027
gttagtta

SEQ ID NO: 189339 - DNA, 12 bp, Unknown
  misc_feature (1)..( 12): Result.005 file - promoters50/4768027
aggatttgtgat

SEQ ID NO: 189340 - DNA, 12 bp, Unknown
  misc_feature (1)..( 12): Result.005 file - promoters50/4768027
aaagtttctgaa

SEQ ID NO: 189341 - DNA, 12 bp, Unknown
  misc_feature (1)..( 12): Result.005 file - promoters50/4768027
aggaattgagat

SEQ ID NO: 189342 - DNA, 13 bp, Unknown
  misc_feature (1)..( 13): Result.005 file - promoters50/4768027
gaggatttgtgat

SEQ ID NO: 189343 - DNA, 13 bp, Unknown
  misc_feature (1)..( 13): Result.005 file - promoters50/4768027
tgggatttggtat

SEQ ID NO: 189344 - DNA, 13 bp, Unknown
  misc_feature (1)..( 13): Result.005 file - promoters50/4768027
aaggaattgagat

SEQ ID NO: 189345 - DNA, 13 bp, Unknown
  misc_feature (1)..( 13): Result.005 file - promoters50/4768027
gagcatttatgtg

SEQ ID NO: 189346 - DNA, 11 bp, Unknown
  misc_feature (1)..( 11): Result.005 file - promoters50/4768027
agaaaaaagga

SEQ ID NO: 189347 - DNA, 11 bp, Unknown
  misc_feature (1)..( 11): Result.005 file - promoters50/4768027
agataaaacag

SEQ ID NO: 189348 - DNA, 11 bp, Unknown
  misc_feature (1)..( 11): Result.005 file - promoters50/4768027
ggttaaaacag

SEQ ID NO: 189349 - DNA, 9 bp, Unknown
  misc_feature (1)..( 9): Result.005 file - promoters50/4768027
ggacaaagg

SEQ ID NO: 189350 - DNA, 9 bp, Unknown
  misc_feature (1)..( 9): Result.005 file - promoters50/4768027
tgacacagg

SEQ ID NO: 189351 - DNA, 9 bp, Unknown
  misc_feature (1)..( 9): Result.005 file - promoters50/4768027
tgatacatt

SEQ ID NO: 189352 - DNA, 8 bp, Unknown
  misc_feature (1)..( 8): Result.005 file - promoters50/4768027
gagttaaa

SEQ ID NO: 189353 - DNA, 8 bp, Unknown
  misc_feature (1)..( 8): Result.005 file - promoters50/4768027
gagttaac

SEQ ID NO: 189354 - DNA, 8 bp, Unknown
  misc_feature (1)..( 8): Result.005 file - promoters50/4768027
tagtcaaa

SEQ ID NO: 189355 - DNA, 6 bp, Unknown
  misc_feature (1)..( 6): Result.005 file - promoters50/4768027
aaaaca

SEQ ID NO: 189356 - DNA, 6 bp, Unknown
  misc_feature (1)..( 6): Result.005 file - promoters50/4768027
aaaaca

SEQ ID NO: 189357 - DNA, 6 bp, Unknown
  misc_feature (1)..( 6): Result.005 file - promoters50/4768027
aaaaca

SEQ ID NO: 189358 - DNA, 12 bp, Unknown
  misc_feature (1)..( 12): Result.005 file - promoters50/4768035
aattatgcatgt

SEQ ID NO: 189359 - DNA, 12 bp, Unknown
  misc_feature (1)..( 12): Result.005 file - promoters50/4768035
gttcatgcctgt

SEQ ID NO: 189360 - DNA, 12 bp, Unknown
  misc_feature (1)..( 12): Result.005 file - promoters50/4768035
gttcatgccaag

SEQ ID NO: 189361 - DNA, 12 bp, Unknown
  misc_feature (1)..( 12): Result.005 file - promoters50/4768039
attaatataata

SEQ ID NO: 189362 - DNA, 12 bp, Unknown
  misc_feature (1)..( 12): Result.005 file - promoters50/4768039
tttattatagat

SEQ ID NO: 189363 - DNA, 12 bp, Unknown
  misc_feature (1)..( 12): Result.005 file - promoters50/4768039
cacattatcgat

SEQ ID NO: 189364 - DNA, 12 bp, Unknown
  misc_feature (1)..( 12): Result.005 file - promoters50/4768039
ttttttattttt

SEQ ID NO: 189365 - DNA, 12 bp, Unknown
  misc_feature (1)..( 12): Result.005 file - promoters50/4768039
tttgttagaaag

SEQ ID NO: 189366 - DNA, 12 bp, Unknown
  misc_feature (1)..( 12): Result.005 file - promoters50/4768039
atttctatgtgt

SEQ ID NO: 189367 - DNA, 11 bp, Unknown
  misc_feature (1)..( 11): Result.005 file - promoters50/4768039
caaaaaaaaag

SEQ ID NO: 189368 - DNA, 11 bp, Unknown
  misc_feature (1)..( 11): Result.005 file - promoters50/4768039
caaacaaaaat

SEQ ID NO: 189369 - DNA, 11 bp, Unknown
  misc_feature (1)..( 11): Result.005 file - promoters50/4768039
ggaagaaaaag

SEQ ID NO: 189370 - DNA, 12 bp, Unknown
  misc_feature (1)..( 12): Result.005 file - promoters50/4768039
ataacaataaat

SEQ ID NO: 189371 - DNA, 12 bp, Unknown
  misc_feature (1)..( 12): Result.005 file - promoters50/4768039
ttaaaaataaac

SEQ ID NO: 189372 - DNA, 12 bp, Unknown
  misc_feature (1)..( 12): Result.005 file - promoters50/4768039
ataacaacaaaa

SEQ ID NO: 189373 - DNA, 9 bp, Unknown
  misc_feature (1)..( 9): Result.005 file - promoters50/4768039
aaataaata

SEQ ID NO: 189374 - DNA, 9 bp, Unknown
  misc_feature (1)..( 9): Result.005 file - promoters50/4768039
aaataaaag

SEQ ID NO: 189375 - DNA, 10 bp, Unknown
  misc_feature (1)..( 10): Result.005 file - promoters50/4768039
aaattaaaaa

SEQ ID NO: 189376 - DNA, 10 bp, Unknown
  misc_feature (1)..( 10): Result.005 file - promoters50/4768039
aaaacaaagg

SEQ ID NO: 189377 - DNA, 10 bp, Unknown
  misc_feature (1)..( 10): Result.005 file - promoters50/4768039
tatacaagaa

SEQ ID NO: 189378 - DNA, 10 bp, Unknown
  misc_feature (1)..( 10): Result.005 file - promoters50/4768039
aaagcaaaca

SEQ ID NO: 189379 - DNA, 9 bp, Unknown
  misc_feature (1)..( 9): Result.005 file - promoters50/4768063
caaaaaaga

SEQ ID NO: 189380 - DNA, 9 bp, Unknown
  misc_feature (1)..( 9): Result.005 file - promoters50/4768063
aaaacaaga

SEQ ID NO: 189381 - DNA, 9 bp, Unknown
  misc_feature (1)..( 9): Result.005 file - promoters50/4768063
caaaaaata

SEQ ID NO: 189382 - DNA, 9 bp, Unknown
  misc_feature (1)..( 9): Result.005 file - promoters50/4768063
ggaacaaga

SEQ ID NO: 189383 - DNA, 9 bp, Unknown
  misc_feature (1)..( 9): Result.005 file - promoters50/4768063
caaacacaa

SEQ ID NO: 189384 - DNA, 9 bp, Unknown
  misc_feature (1)..( 9): Result.005 file - promoters50/4768063
tatttaacc

SEQ ID NO: 189385 - DNA, 9 bp, Unknown
  misc_feature (1)..( 9): Result.005 file - promoters50/4768063
tatataaat

SEQ ID NO: 189386 - DNA, 9 bp, Unknown
  misc_feature (1)..( 9): Result.005 file - promoters50/4768063
tctataaat

SEQ ID NO: 189387 - DNA, 9 bp, Unknown
  misc_feature (1)..( 9): Result.005 file - promoters50/4768063
aatagaaaa

SEQ ID NO: 189388 - DNA, 6 bp, Unknown
  misc_feature (1)..( 6): Result.005 file - promoters50/4768066
gtatat

SEQ ID NO: 189389 - DNA, 6 bp, Unknown
  misc_feature (1)..( 6): Result.005 file - promoters50/4768066
gtatat

SEQ ID NO: 189390 - DNA, 6 bp, Unknown
  misc_feature (1)..( 6): Result.005 file - promoters50/4768066
gtatat

SEQ ID NO: 189391 - DNA, 7 bp, Unknown
  misc_feature (1)..( 7): Result.005 file - promoters50/4768077
catgttt

SEQ ID NO: 189392 - DNA, 7 bp, Unknown
  misc_feature (1)..( 7): Result.005 file - promoters50/4768077
catcttt

SEQ ID NO: 189393 - DNA, 7 bp, Unknown
  misc_feature (1)..( 7): Result.005 file - promoters50/4768077
tgtgttt

SEQ ID NO: 189394 - DNA, 8 bp, Unknown
  misc_feature (1)..( 8): Result.005 file - promoters50/4768077
tttggaat

SEQ ID NO: 189395 - DNA, 8 bp, Unknown
  misc_feature (1)..( 8): Result.005 file - promoters50/4768077
tttcgaaa

SEQ ID NO: 189396 - DNA, 8 bp, Unknown
  misc_feature (1)..( 8): Result.005 file - promoters50/4768077
tctggaat

SEQ ID NO: 189397 - DNA, 11 bp, Unknown
  misc_feature (1)..( 11): Result.005 file - promoters50/4768093
tttttacaacc

SEQ ID NO: 189398 - DNA, 11 bp, Unknown
  misc_feature (1)..( 11): Result.005 file - promoters50/4768093
tttttataaca

SEQ ID NO: 189399 - DNA, 6 bp, Unknown
  misc_feature (1)..( 6): Result.005 file - promoters50/4768093
acaacc

SEQ ID NO: 189400 - DNA, 10 bp, Unknown
  misc_feature (1)..( 10): Result.005 file - promoters50/4768093
tatattaatt

SEQ ID NO: 189401 - DNA, 10 bp, Unknown
  misc_feature (1)..( 10): Result.005 file - promoters50/4768093
tatattcata

SEQ ID NO: 189402 - DNA, 10 bp, Unknown
  misc_feature (1)..( 10): Result.005 file - promoters50/4768093
cataatcatt

SEQ ID NO: 189403 - DNA, 10 bp, Unknown
  misc_feature (1)..( 10): Result.005 file - promoters50/4768093
tatatacata

SEQ ID NO: 189404 - DNA, 9 bp, Unknown
  misc_feature (1)..( 9): Result.005 file - promoters50/4768093
agtttaatc

SEQ ID NO: 189405 - DNA, 9 bp, Unknown
  misc_feature (1)..( 9): Result.005 file - promoters50/4768093
tatttaatt

SEQ ID NO: 189406 - DNA, 9 bp, Unknown
  misc_feature (1)..( 9): Result.005 file - promoters50/4768093
tatttcatt

SEQ ID NO: 189407 - DNA, 10 bp, Unknown
  misc_feature (1)..( 10): Result.005 file - promoters50/4768093
agatttcaat

SEQ ID NO: 189408 - DNA, 10 bp, Unknown
  misc_feature (1)..( 10): Result.005 file - promoters50/4768093
agattttaga

SEQ ID NO: 189409 - DNA, 10 bp, Unknown
  misc_feature (1)..( 10): Result.005 file - promoters50/4768093
agattttaat

SEQ ID NO: 189410 - DNA, 14 bp, Unknown
  misc_feature (1)..( 14): Result.005 file - promoters50/4768093
ttagattaaataat

SEQ ID NO: 189411 - DNA, 14 bp, Unknown
  misc_feature (1)..( 14): Result.005 file - promoters50/4768093
ttagattttactat

SEQ ID NO: 189412 - DNA, 14 bp, Unknown
  misc_feature (1)..( 14): Result.005 file - promoters50/4768093
agagattttaatat

SEQ ID NO: 189413 - DNA, 7 bp, Unknown
  misc_feature (1)..( 7): Result.005 file - promoters50/4768093
ctaatta

SEQ ID NO: 189414 - DNA, 7 bp, Unknown
  misc_feature (1)..( 7): Result.005 file - promoters50/4768093
ctattta

SEQ ID NO: 189415 - DNA, 7 bp, Unknown
  misc_feature (1)..( 7): Result.005 file - promoters50/4768093
ataatta

SEQ ID NO: 189416 - DNA, 16 bp, Unknown
  misc_feature (1)..( 16): Result.005 file - promoters50/4768093
aaaagtatattttcga

SEQ ID NO: 189417 - DNA, 16 bp, Unknown
  misc_feature (1)..( 16): Result.005 file - promoters50/4768093
aaaagtatatttcatt

SEQ ID NO: 189418 - DNA, 16 bp, Unknown
  misc_feature (1)..( 16): Result.005 file - promoters50/4768093
tttggtatatagttac

SEQ ID NO: 189419 - DNA, 16 bp, Unknown
  misc_feature (1)..( 16): Result.005 file - promoters50/4768093
gttaatttatttaatt

SEQ ID NO: 189420 - DNA, 11 bp, Unknown
  misc_feature (1)..( 11): Result.005 file - promoters50/4768093
aatcaaatttt

SEQ ID NO: 189421 - DNA, 11 bp, Unknown
  misc_feature (1)..( 11): Result.005 file - promoters50/4768093
aattaaatttt

SEQ ID NO: 189422 - DNA, 11 bp, Unknown
  misc_feature (1)..( 11): Result.005 file - promoters50/4768093
aatcaacaatg

SEQ ID NO: 189423 - DNA, 8 bp, Unknown
  misc_feature (1)..( 8): Result.005 file - promoters50/4768093
attaaata

SEQ ID NO: 189424 - DNA, 8 bp, Unknown
  misc_feature (1)..( 8): Result.005 file - promoters50/4768093
attacata

SEQ ID NO: 189425 - DNA, 8 bp, Unknown
  misc_feature (1)..( 8): Result.005 file - promoters50/4768093
attacact

SEQ ID NO: 189426 - DNA, 10 bp, Unknown
  misc_feature (1)..( 10): Result.005 file - promoters50/4768093
tatatattaa

SEQ ID NO: 189427 - DNA, 10 bp, Unknown
  misc_feature (1)..( 10): Result.005 file - promoters50/4768093
tatatacata

SEQ ID NO: 189428 - DNA, 10 bp, Unknown
  misc_feature (1)..( 10): Result.005 file - promoters50/4768093
tatattcata

SEQ ID NO: 189429 - DNA, 9 bp, Unknown
  misc_feature (1)..( 9): Result.005 file - promoters50/4768104
aacgaaaag

SEQ ID NO: 189430 - DNA, 9 bp, Unknown
  misc_feature (1)..( 9): Result.005 file - promoters50/4768104
cacgaaaat

SEQ ID NO: 189431 - DNA, 9 bp, Unknown
  misc_feature (1)..( 9): Result.005 file - promoters50/4768104
cacgaagaa

SEQ ID NO: 189432 - DNA, 9 bp, Unknown
  misc_feature (1)..( 9): Result.005 file - promoters50/4768104
caccaagaa

SEQ ID NO: 189433 - DNA, 11 bp, Unknown
  misc_feature (1)..( 11): Result.005 file - promoters50/4768104
agcaaaagatt

SEQ ID NO: 189434 - DNA, 11 bp, Unknown
  misc_feature (1)..( 11): Result.005 file - promoters50/4768104
accaagagatc

SEQ ID NO: 189435 - DNA, 12 bp, Unknown
  misc_feature (1)..( 12): Result.005 file - promoters50/4768104
cccaaaaatatt

SEQ ID NO: 189436 - DNA, 12 bp, Unknown
  misc_feature (1)..( 12): Result.005 file - promoters50/4768104
cccataaattga

SEQ ID NO: 189437 - DNA, 10 bp, Unknown
  misc_feature (1)..( 10): Result.005 file - promoters50/4768104
atacattttg

SEQ ID NO: 189438 - DNA, 10 bp, Unknown
  misc_feature (1)..( 10): Result.005 file - promoters50/4768104
aaacatttaa

SEQ ID NO: 189439 - DNA, 10 bp, Unknown
  misc_feature (1)..( 10): Result.005 file - promoters50/4768104
gaccatgtaa

SEQ ID NO: 189440 - DNA, 10 bp, Unknown
  misc_feature (1)..( 10): Result.005 file - promoters50/4768104
aaagattcca

SEQ ID NO: 189441 - DNA, 10 bp, Unknown
  misc_feature (1)..( 10): Result.005 file - promoters50/4768112
tgtgatttat

SEQ ID NO: 189442 - DNA, 10 bp, Unknown
  misc_feature (1)..( 10): Result.005 file - promoters50/4768112
tgtgttttgc

SEQ ID NO: 189443 - DNA, 10 bp, Unknown
  misc_feature (1)..( 10): Result.005 file - promoters50/4768112
tgagttttga

SEQ ID NO: 189444 - DNA, 11 bp, Unknown
  misc_feature (1)..( 11): Result.005 file - promoters50/4768112
atttataactt

SEQ ID NO: 189445 - DNA, 11 bp, Unknown
  misc_feature (1)..( 11): Result.005 file - promoters50/4768112
tcatatcactt

SEQ ID NO: 189446 - DNA, 11 bp, Unknown
  misc_feature (1)..( 11): Result.005 file - promoters50/4768112
atttctaagga

SEQ ID NO: 189447 - DNA, 10 bp, Unknown
  misc_feature (1)..( 10): Result.005 file - promoters50/4768112
atatcttcat

SEQ ID NO: 189448 - DNA, 10 bp, Unknown
  misc_feature (1)..( 10): Result.005 file - promoters50/4768112
ttatgttcct

SEQ ID NO: 189449 - DNA, 10 bp, Unknown
  misc_feature (1)..( 10): Result.005 file - promoters50/4768112
atattttcat

SEQ ID NO: 189450 - DNA, 7 bp, Unknown
  misc_feature (1)..( 7): Result.005 file - promoters50/4768143
aaagaaa

SEQ ID NO: 189451 - DNA, 7 bp, Unknown
  misc_feature (1)..( 7): Result.005 file - promoters50/4768143
caagaaa

SEQ ID NO: 189452 - DNA, 7 bp, Unknown
  misc_feature (1)..( 7): Result.005 file - promoters50/4768143
aaacaaa

SEQ ID NO: 189453 - DNA, 10 bp, Unknown
  misc_feature (1)..( 10): Result.005 file - promoters50/4768143
atatgacttt

SEQ ID NO: 189454 - DNA, 10 bp, Unknown
  misc_feature (1)..( 10): Result.005 file - promoters50/4768143
atatgactca

SEQ ID NO: 189455 - DNA, 10 bp, Unknown
  misc_feature (1)..( 10): Result.005 file - promoters50/4768143
ttttgacttt

SEQ ID NO: 189456 - DNA, 13 bp, Unknown
  misc_feature (1)..( 13): Result.005 file - promoters50/4768147
ctctactttctcc

SEQ ID NO: 189457 - DNA, 13 bp, Unknown
  misc_feature (1)..( 13): Result.005 file - promoters50/4768147
caataatttttcc

SEQ ID NO: 189458 - DNA, 13 bp, Unknown
  misc_feature (1)..( 13): Result.005 file - promoters50/4768147
ataatgtttgagt

SEQ ID NO: 189459 - DNA, 7 bp, Unknown
  misc_feature (1)..( 7): Result.005 file - promoters50/4768147
tattata

SEQ ID NO: 189460 - DNA, 7 bp, Unknown
  misc_feature (1)..( 7): Result.005 file - promoters50/4768147
tattatg

SEQ ID NO: 189461 - DNA, 7 bp, Unknown
  misc_feature (1)..( 7): Result.005 file - promoters50/4768147
tattata

SEQ ID NO: 189462 - DNA, 10 bp, Unknown
  misc_feature (1)..( 10): Result.005 file - promoters50/4768147
aaaacaataa

SEQ ID NO: 189463 - DNA, 10 bp, Unknown
  misc_feature (1)..( 10): Result.005 file - promoters50/4768147
taaataataa

SEQ ID NO: 189464 - DNA, 10 bp, Unknown
  misc_feature (1)..( 10): Result.005 file - promoters50/4768147
aaaacacaaa

SEQ ID NO: 189465 - DNA, 8 bp, Unknown
  misc_feature (1)..( 8): Result.005 file - promoters50/4768155
ttatctaa

SEQ ID NO: 189466 - DNA, 8 bp, Unknown
  misc_feature (1)..( 8): Result.005 file - promoters50/4768155
atatataa

SEQ ID NO: 189467 - DNA, 8 bp, Unknown
  misc_feature (1)..( 8): Result.005 file - promoters50/4768155
atatatat

SEQ ID NO: 189468 - DNA, 7 bp, Unknown
  misc_feature (1)..( 7): Result.005 file - promoters50/4768159
caagggt

SEQ ID NO: 189469 - DNA, 7 bp, Unknown
  misc_feature (1)..( 7): Result.005 file - promoters50/4768159
caagggg

SEQ ID NO: 189470 - DNA, 7 bp, Unknown
  misc_feature (1)..( 7): Result.005 file - promoters50/4768159
caaaggt

SEQ ID NO: 189471 - DNA, 8 bp, Unknown
  misc_feature (1)..( 8): Result.005 file - promoters50/4768169
gtttgaaa

SEQ ID NO: 189472 - DNA, 8 bp, Unknown
  misc_feature (1)..( 8): Result.005 file - promoters50/4768169
gttagaac

SEQ ID NO: 189473 - DNA, 8 bp, Unknown
  misc_feature (1)..( 8): Result.005 file - promoters50/4768169
ttttcaaa

SEQ ID NO: 189474 - DNA, 11 bp, Unknown
  misc_feature (1)..( 11): Result.005 file - promoters50/4768198
ttaaaatagtg

SEQ ID NO: 189475 - DNA, 11 bp, Unknown
  misc_feature (1)..( 11): Result.005 file - promoters50/4768198
ttaaaatcaac

SEQ ID NO: 189476 - DNA, 11 bp, Unknown
  misc_feature (1)..( 11): Result.005 file - promoters50/4768198
ttaaaatttat

SEQ ID NO: 189477 - DNA, 11 bp, Unknown
  misc_feature (1)..( 11): Result.005 file - promoters50/4768198
ctgaaatttta

SEQ ID NO: 189478 - DNA, 11 bp, Unknown
  misc_feature (1)..( 11): Result.005 file - promoters50/4768198
aatcaattgtt

SEQ ID NO: 189479 - DNA, 11 bp, Unknown
  misc_feature (1)..( 11): Result.005 file - promoters50/4768198
ttccgattgtt

SEQ ID NO: 189480 - DNA, 11 bp, Unknown
  misc_feature (1)..( 11): Result.005 file - promoters50/4768198
aatcaatggtt

SEQ ID NO: 189481 - DNA, 11 bp, Unknown
  misc_feature (1)..( 11): Result.005 file - promoters50/4768198
aataaattact

SEQ ID NO: 189482 - DNA, 11 bp, Unknown
  misc_feature (1)..( 11): Result.005 file - promoters50/4768198
tgtcatattgt

SEQ ID NO: 189483 - DNA, 11 bp, Unknown
  misc_feature (1)..( 11): Result.005 file - promoters50/4768198
tgtcaaattag

SEQ ID NO: 189484 - DNA, 11 bp, Unknown
  misc_feature (1)..( 11): Result.005 file - promoters50/4768198
gaaaatattgt

SEQ ID NO: 189485 - DNA, 11 bp, Unknown
  misc_feature (1)..( 11): Result.005 file - promoters50/4768198
cttcaaatcaa

SEQ ID NO: 189486 - DNA, 11 bp, Unknown
  misc_feature (1)..( 11): Result.005 file - promoters50/4768198
aaacaaatcat

SEQ ID NO: 189487 - DNA, 9 bp, Unknown
  misc_feature (1)..( 9): Result.005 file - promoters50/4768198
ctagtcttc

SEQ ID NO: 189488 - DNA, 9 bp, Unknown
  misc_feature (1)..( 9): Result.005 file - promoters50/4768198
tgtgtcttc

SEQ ID NO: 189489 - DNA, 7 bp, Unknown
  misc_feature (1)..( 7): Result.005 file - promoters50/4768198
tgtattc

SEQ ID NO: 189490 - DNA, 9 bp, Unknown
  misc_feature (1)..( 9): Result.005 file - promoters50/4768198
tgtttcttt

SEQ ID NO: 189491 - DNA, 12 bp, Unknown
  misc_feature (1)..( 12): Result.005 file - promoters50/4768209
gttattttcata

SEQ ID NO: 189492 - DNA, 12 bp, Unknown
  misc_feature (1)..( 12): Result.005 file - promoters50/4768209
tttattgtcatc

SEQ ID NO: 189493 - DNA, 12 bp, Unknown
  misc_feature (1)..( 12): Result.005 file - promoters50/4768209
gttgtttattta

SEQ ID NO: 189494 - DNA, 12 bp, Unknown
  misc_feature (1)..( 12): Result.005 file - promoters50/4768209
tttttttggaat

SEQ ID NO: 189495 - DNA, 12 bp, Unknown
  misc_feature (1)..( 12): Result.005 file - promoters50/4768209
gattttgtctat

SEQ ID NO: 189496 - DNA, 9 bp, Unknown
  misc_feature (1)..( 9): Result.005 file - promoters50/4768217
aaaggtttt

SEQ ID NO: 189497 - DNA, 9 bp, Unknown
  misc_feature (1)..( 9): Result.005 file - promoters50/4768217
taagattta

SEQ ID NO: 189498 - DNA, 10 bp, Unknown
  misc_feature (1)..( 10): Result.005 file - promoters50/4768217
ataggtgttg

SEQ ID NO: 189499 - DNA, 10 bp, Unknown
  misc_feature (1)..( 10): Result.005 file - promoters50/4768217
aaagattgtg

SEQ ID NO: 189500 - DNA, 10 bp, Unknown
  misc_feature (1)..( 10): Result.005 file - promoters50/4768217
agagattttg

SEQ ID NO: 189501 - DNA, 10 bp, Unknown
  misc_feature (1)..( 10): Result.005 file - promoters50/4768217
aaagattttt

SEQ ID NO: 189502 - DNA, 13 bp, Unknown
  misc_feature (1)..( 13): Result.005 file - promoters50/4768236
ccaaaactaatca

SEQ ID NO: 189503 - DNA, 13 bp, Unknown
  misc_feature (1)..( 13): Result.005 file - promoters50/4768236
tgaaaaataaact

SEQ ID NO: 189504 - DNA, 13 bp, Unknown
  misc_feature (1)..( 13): Result.005 file - promoters50/4768236
attaaaatattcg

SEQ ID NO: 189505 - DNA, 13 bp, Unknown
  misc_feature (1)..( 13): Result.005 file - promoters50/4768236
tgacaaataaaca

SEQ ID NO: 189506 - DNA, 11 bp, Unknown
  misc_feature (1)..( 11): Result.005 file - promoters50/4768236
ccatttaaatc

SEQ ID NO: 189507 - DNA, 13 bp, Unknown
  misc_feature (1)..( 13): Result.005 file - promoters50/4768236
attattttatatc

SEQ ID NO: 189508 - DNA, 13 bp, Unknown
  misc_feature (1)..( 13): Result.005 file - promoters50/4768236
ctgaataaaaaaa

SEQ ID NO: 189509 - DNA, 13 bp, Unknown
  misc_feature (1)..( 13): Result.005 file - promoters50/4768236
ctggatatgtgtg

SEQ ID NO: 189510 - DNA, 13 bp, Unknown
  misc_feature (1)..( 13): Result.005 file - promoters50/4768236
gtgaatagtagtt

SEQ ID NO: 189511 - DNA, 13 bp, Unknown
  misc_feature (1)..( 13): Result.005 file - promoters50/4768236
ttgaaaaaaaaaa

SEQ ID NO: 189512 - DNA, 13 bp, Unknown
  misc_feature (1)..( 13): Result.005 file - promoters50/4768236
ttggaaattctgg

SEQ ID NO: 189513 - DNA, 13 bp, Unknown
  misc_feature (1)..( 13): Result.005 file - promoters50/4768236
aagaagaaaaaat

SEQ ID NO: 189514 - DNA, 14 bp, Unknown
  misc_feature (1)..( 14): Result.005 file - promoters50/4768236
ttataaaaaaatat

SEQ ID NO: 189515 - DNA, 14 bp, Unknown
  misc_feature (1)..( 14): Result.005 file - promoters50/4768236
gtccaaaaaagaaa

SEQ ID NO: 189516 - DNA, 14 bp, Unknown
  misc_feature (1)..( 14): Result.005 file - promoters50/4768236
gttcaaacaatcat

SEQ ID NO: 189517 - DNA, 14 bp, Unknown
  misc_feature (1)..( 14): Result.005 file - promoters50/4768236
tcctaaaaacattg

SEQ ID NO: 189518 - DNA, 14 bp, Unknown
  misc_feature (1)..( 14): Result.005 file - promoters50/4768236
ttagaaaaaaaatt

SEQ ID NO: 189519 - DNA, 14 bp, Unknown
  misc_feature (1)..( 14): Result.005 file - promoters50/4768236
atagcaaaaatgaa

SEQ ID NO: 189520 - DNA, 10 bp, Unknown
  misc_feature (1)..( 10): Result.005 file - promoters50/4768236
aaaaaatatt

SEQ ID NO: 189521 - DNA, 10 bp, Unknown
  misc_feature (1)..( 10): Result.005 file - promoters50/4768236
agaaattata

SEQ ID NO: 189522 - DNA, 10 bp, Unknown
  misc_feature (1)..( 10): Result.005 file - promoters50/4768236
tcaaacaatc

SEQ ID NO: 189523 - DNA, 10 bp, Unknown
  misc_feature (1)..( 10): Result.005 file - promoters50/4768236
taaaaacatt

SEQ ID NO: 189524 - DNA, 10 bp, Unknown
  misc_feature (1)..( 10): Result.005 file - promoters50/4768236
agcaaaaatg

SEQ ID NO: 189525 - DNA, 10 bp, Unknown
  misc_feature (1)..( 10): Result.005 file - promoters50/4768236
aaaaaaaatt

SEQ ID NO: 189526 - DNA, 17 bp, Unknown
  misc_feature (1)..( 17): Result.005 file - promoters50/4768236
gaaaataattatattta

SEQ ID NO: 189527 - DNA, 17 bp, Unknown
  misc_feature (1)..( 17): Result.005 file - promoters50/4768236
aaattctattttattgt

SEQ ID NO: 189528 - DNA, 17 bp, Unknown
  misc_feature (1)..( 17): Result.005 file - promoters50/4768236
gaaagtaactatcttat

SEQ ID NO: 189529 - DNA, 17 bp, Unknown
  misc_feature (1)..( 17): Result.005 file - promoters50/4768236
cacccaaattttacaga

SEQ ID NO: 189530 - DNA, 17 bp, Unknown
  misc_feature (1)..( 17): Result.005 file - promoters50/4768236
ttatcttcttattggat

SEQ ID NO: 189531 - DNA, 17 bp, Unknown
  misc_feature (1)..( 17): Result.005 file - promoters50/4768236
acgatgtcgtttagtgt

SEQ ID NO: 189532 - DNA, 13 bp, Unknown
  misc_feature (1)..( 13): Result.005 file - promoters50/4768239
atatgatagatta

SEQ ID NO: 189533 - DNA, 13 bp, Unknown
  misc_feature (1)..( 13): Result.005 file - promoters50/4768239
ttattataaaata

SEQ ID NO: 189534 - DNA, 13 bp, Unknown
  misc_feature (1)..( 13): Result.005 file - promoters50/4768239
agattacaaaatt

SEQ ID NO: 189535 - DNA, 13 bp, Unknown
  misc_feature (1)..( 13): Result.005 file - promoters50/4768239
gtacgaaagaaaa

SEQ ID NO: 189536 - DNA, 13 bp, Unknown
  misc_feature (1)..( 13): Result.005 file - promoters50/4768239
agattaccttaga

SEQ ID NO: 189537 - DNA, 13 bp, Unknown
  misc_feature (1)..( 13): Result.005 file - promoters50/4768239
tcgtaaaaattta

SEQ ID NO: 189538 - DNA, 13 bp, Unknown
  misc_feature (1)..( 13): Result.005 file - promoters50/4768239
ggattacgtggcg

SEQ ID NO: 189539 - DNA, 13 bp, Unknown
  misc_feature (1)..( 13): Result.005 file - promoters50/4768239
gcaaaatcgaaaa

SEQ ID NO: 189540 - DNA, 13 bp, Unknown
  misc_feature (1)..( 13): Result.005 file - promoters50/4768239
ttacaattgaaaa

SEQ ID NO: 189541 - DNA, 13 bp, Unknown
  misc_feature (1)..( 13): Result.005 file - promoters50/4768239
gttaaattgatct

SEQ ID NO: 189542 - DNA, 13 bp, Unknown
  misc_feature (1)..( 13): Result.005 file - promoters50/4768239
ttataattggttc

SEQ ID NO: 189543 - DNA, 13 bp, Unknown
  misc_feature (1)..( 13): Result.005 file - promoters50/4768239
taataatttaact

SEQ ID NO: 189544 - DNA, 14 bp, Unknown
  misc_feature (1)..( 14): Result.005 file - promoters50/4768239
aactaacttagttt

SEQ ID NO: 189545 - DNA, 13 bp, Unknown
  misc_feature (1)..( 13): Result.005 file - promoters50/4768239
ttttaatacaaaa

SEQ ID NO: 189546 - DNA, 13 bp, Unknown
  misc_feature (1)..( 13): Result.005 file - promoters50/4768239
atgtaaaacaaaa

SEQ ID NO: 189547 - DNA, 13 bp, Unknown
  misc_feature (1)..( 13): Result.005 file - promoters50/4768239
cattaataatcct

SEQ ID NO: 189548 - DNA, 13 bp, Unknown
  misc_feature (1)..( 13): Result.005 file - promoters50/4768239
acttaaaactcgt

SEQ ID NO: 189549 - DNA, 13 bp, Unknown
  misc_feature (1)..( 13): Result.005 file - promoters50/4768239
ttgcaaatctcgc

SEQ ID NO: 189550 - DNA, 13 bp, Unknown
  misc_feature (1)..( 13): Result.005 file - promoters50/4768239
cattaattatgat

SEQ ID NO: 189551 - DNA, 9 bp, Unknown
  misc_feature (1)..( 9): Result.005 file - promoters50/4768246
tttaagatt

SEQ ID NO: 189552 - DNA, 9 bp, Unknown
  misc_feature (1)..( 9): Result.005 file - promoters50/4768246
ttttagatc

SEQ ID NO: 189553 - DNA, 9 bp, Unknown
  misc_feature (1)..( 9): Result.005 file - promoters50/4768246
aataatatt

SEQ ID NO: 189554 - DNA, 9 bp, Unknown
  misc_feature (1)..( 9): Result.005 file - promoters50/4768246
gatttaatt

SEQ ID NO: 189555 - DNA, 9 bp, Unknown
  misc_feature (1)..( 9): Result.005 file - promoters50/4768246
tatttaaat

SEQ ID NO: 189556 - DNA, 9 bp, Unknown
  misc_feature (1)..( 9): Result.005 file - promoters50/4768246
tatgtaaat

SEQ ID NO: 189557 - DNA, 7 bp, Unknown
  misc_feature (1)..( 7): Result.005 file - promoters50/4768246
tatatta

SEQ ID NO: 189558 - DNA, 7 bp, Unknown
  misc_feature (1)..( 7): Result.005 file - promoters50/4768246
tatattt

SEQ ID NO: 189559 - DNA, 7 bp, Unknown
  misc_feature (1)..( 7): Result.005 file - promoters50/4768246
aatatta

SEQ ID NO: 189560 - DNA, 9 bp, Unknown
  misc_feature (1)..( 9): Result.005 file - promoters50/4768246
gtttgtgtt

SEQ ID NO: 189561 - DNA, 9 bp, Unknown
  misc_feature (1)..( 9): Result.005 file - promoters50/4768246
ttttgggtt

SEQ ID NO: 189562 - DNA, 9 bp, Unknown
  misc_feature (1)..( 9): Result.005 file - promoters50/4768246
ttttggaag

SEQ ID NO: 189563 - DNA, 11 bp, Unknown
  misc_feature (1)..( 11): Result.005 file - promoters50/4768250
tcttttagtta

SEQ ID NO: 189564 - DNA, 11 bp, Unknown
  misc_feature (1)..( 11): Result.005 file - promoters50/4768250
acttgtagtac

SEQ ID NO: 189565 - DNA, 11 bp, Unknown
  misc_feature (1)..( 11): Result.005 file - promoters50/4768250
taatttattta

SEQ ID NO: 189566 - DNA, 11 bp, Unknown
  misc_feature (1)..( 11): Result.005 file - promoters50/4768250
tgttttggttg

SEQ ID NO: 189567 - DNA, 11 bp, Unknown
  misc_feature (1)..( 11): Result.005 file - promoters50/4768250
tctttttcttg

SEQ ID NO: 189568 - DNA, 11 bp, Unknown
  misc_feature (1)..( 11): Result.005 file - promoters50/4768250
gactttattat

SEQ ID NO: 189569 - DNA, 13 bp, Unknown
  misc_feature (1)..( 13): Result.005 file - promoters50/4768250
ggtagaaaaacct

SEQ ID NO: 189570 - DNA, 13 bp, Unknown
  misc_feature (1)..( 13): Result.005 file - promoters50/4768250
agaagaaaaaaat

SEQ ID NO: 189571 - DNA, 13 bp, Unknown
  misc_feature (1)..( 13): Result.005 file - promoters50/4768250
gatacaaaaccct

SEQ ID NO: 189572 - DNA, 13 bp, Unknown
  misc_feature (1)..( 13): Result.005 file - promoters50/4768250
tttctaaaataat

SEQ ID NO: 189573 - DNA, 13 bp, Unknown
  misc_feature (1)..( 13): Result.005 file - promoters50/4768250
attttaaaaaata

SEQ ID NO: 189574 - DNA, 13 bp, Unknown
  misc_feature (1)..( 13): Result.005 file - promoters50/4768250
tttataatatata

SEQ ID NO: 189575 - DNA, 13 bp, Unknown
  misc_feature (1)..( 13): Result.005 file - promoters50/4768250
gtaataatattga

SEQ ID NO: 189576 - DNA, 10 bp, Unknown
  misc_feature (1)..( 10): Result.005 file - promoters50/4768250
ttaaataata

SEQ ID NO: 189577 - DNA, 10 bp, Unknown
  misc_feature (1)..( 10): Result.005 file - promoters50/4768250
gaaaaaaatt

SEQ ID NO: 189578 - DNA, 10 bp, Unknown
  misc_feature (1)..( 10): Result.005 file - promoters50/4768250
taaaataata

SEQ ID NO: 189579 - DNA, 10 bp, Unknown
  misc_feature (1)..( 10): Result.005 file - promoters50/4768250
ttaattaaaa

SEQ ID NO: 189580 - DNA, 10 bp, Unknown
  misc_feature (1)..( 10): Result.005 file - promoters50/4768250
ttaaaaaata

SEQ ID NO: 189581 - DNA, 10 bp, Unknown
  misc_feature (1)..( 10): Result.005 file - promoters50/4768250
agaataaaaa

SEQ ID NO: 189582 - DNA, 10 bp, Unknown
  misc_feature (1)..( 10): Result.005 file - promoters50/4768250
agatttaaag

SEQ ID NO: 189583 - DNA, 14 bp, Unknown
  misc_feature (1)..( 14): Result.005 file - promoters50/4768250
taccgatttctttt

SEQ ID NO: 189584 - DNA, 14 bp, Unknown
  misc_feature (1)..( 14): Result.005 file - promoters50/4768250
taataatttattta

SEQ ID NO: 189585 - DNA, 14 bp, Unknown
  misc_feature (1)..( 14): Result.005 file - promoters50/4768250
cagcgacttcacgc

SEQ ID NO: 189586 - DNA, 14 bp, Unknown
  misc_feature (1)..( 14): Result.005 file - promoters50/4768250
tttttctctctttt

SEQ ID NO: 189587 - DNA, 14 bp, Unknown
  misc_feature (1)..( 14): Result.005 file - promoters50/4768250
tctgactttattat

SEQ ID NO: 189588 - DNA, 14 bp, Unknown
  misc_feature (1)..( 14): Result.005 file - promoters50/4768250
cagagacatcaatt

SEQ ID NO: 189589 - DNA, 10 bp, Unknown
  misc_feature (1)..( 10): Result.005 file - promoters50/4768250
aataatattg

SEQ ID NO: 189590 - DNA, 10 bp, Unknown
  misc_feature (1)..( 10): Result.005 file - promoters50/4768250
tacaatattt

SEQ ID NO: 189591 - DNA, 11 bp, Unknown
  misc_feature (1)..( 11): Result.005 file - promoters50/4768250
caaaattatat

SEQ ID NO: 189592 - DNA, 11 bp, Unknown
  misc_feature (1)..( 11): Result.005 file - promoters50/4768250
aatcaatatgt

SEQ ID NO: 189593 - DNA, 11 bp, Unknown
  misc_feature (1)..( 11): Result.005 file - promoters50/4768250
caaacttatcc

SEQ ID NO: 189594 - DNA, 11 bp, Unknown
  misc_feature (1)..( 11): Result.005 file - promoters50/4768250
aaaactttaaa

SEQ ID NO: 189595 - DNA, 12 bp, Unknown
  misc_feature (1)..( 12): Result.005 file - promoters50/4768250
aaaatgaaacca

SEQ ID NO: 189596 - DNA, 12 bp, Unknown
  misc_feature (1)..( 12): Result.005 file - promoters50/4768250
aaactgagttta

SEQ ID NO: 189597 - DNA, 12 bp, Unknown
  misc_feature (1)..( 12): Result.005 file - promoters50/4768250
gaaataaattgt

SEQ ID NO: 189598 - DNA, 12 bp, Unknown
  misc_feature (1)..( 12): Result.005 file - promoters50/4768250
taattaaatcaa

SEQ ID NO: 189599 - DNA, 12 bp, Unknown
  misc_feature (1)..( 12): Result.005 file - promoters50/4768250
atgttagatcgc

SEQ ID NO: 189600 - DNA, 12 bp, Unknown
  misc_feature (1)..( 12): Result.005 file - promoters50/4768250
tgatcaaaatag

SEQ ID NO: 189601 - DNA, 10 bp, Unknown
  misc_feature (1)..( 10): Result.005 file - promoters50/4768253
tttaagaaac

SEQ ID NO: 189602 - DNA, 10 bp, Unknown
  misc_feature (1)..( 10): Result.005 file - promoters50/4768253
aaaaagaaaa

SEQ ID NO: 189603 - DNA, 11 bp, Unknown
  misc_feature (1)..( 11): Result.005 file - promoters50/4768253
cataagacaaa

SEQ ID NO: 189604 - DNA, 11 bp, Unknown
  misc_feature (1)..( 11): Result.005 file - promoters50/4768253
aaaaacaaaac

SEQ ID NO: 189605 - DNA, 9 bp, Unknown
  misc_feature (1)..( 9): Result.005 file - promoters50/4768253
aaagaaaaa

SEQ ID NO: 189606 - DNA, 9 bp, Unknown
  misc_feature (1)..( 9): Result.005 file - promoters50/4768253
taagacaaa

SEQ ID NO: 189607 - DNA, 9 bp, Unknown
  misc_feature (1)..( 9): Result.005 file - promoters50/4768253
aaacaaaac

SEQ ID NO: 189608 - DNA, 9 bp, Unknown
  misc_feature (1)..( 9): Result.005 file - promoters50/4768253
aaattgact

SEQ ID NO: 189609 - DNA, 9 bp, Unknown
  misc_feature (1)..( 9): Result.005 file - promoters50/4768253
taattgaaa

SEQ ID NO: 189610 - DNA, 9 bp, Unknown
  misc_feature (1)..( 9): Result.005 file - promoters50/4768253
taaatgaaa

SEQ ID NO: 189611 - DNA, 11 bp, Unknown
  misc_feature (1)..( 11): Result.005 file - promoters50/4768265
tatttatgtgg

SEQ ID NO: 189612 - DNA, 11 bp, Unknown
  misc_feature (1)..( 11): Result.005 file - promoters50/4768265
aatttatttaa

SEQ ID NO: 189613 - DNA, 11 bp, Unknown
  misc_feature (1)..( 11): Result.005 file - promoters50/4768265
gattgattgat

SEQ ID NO: 189614 - DNA, 11 bp, Unknown
  misc_feature (1)..( 11): Result.005 file - promoters50/4768265
catttttttct

SEQ ID NO: 189615 - DNA, 11 bp, Unknown
  misc_feature (1)..( 11): Result.005 file - promoters50/4768265
cattttcgttt

SEQ ID NO: 189616 - DNA, 11 bp, Unknown
  misc_feature (1)..( 11): Result.005 file - promoters50/4768265
gtctgatggat

SEQ ID NO: 189617 - DNA, 13 bp, Unknown
  misc_feature (1)..( 13): Result.005 file - promoters50/4768265
tgttattagggat

SEQ ID NO: 189618 - DNA, 13 bp, Unknown
  misc_feature (1)..( 13): Result.005 file - promoters50/4768265
ctgtattagtgat

SEQ ID NO: 189619 - DNA, 13 bp, Unknown
  misc_feature (1)..( 13): Result.005 file - promoters50/4768265
gtttattataata

SEQ ID NO: 189620 - DNA, 13 bp, Unknown
  misc_feature (1)..( 13): Result.005 file - promoters50/4768265
tcggattagggtt

SEQ ID NO: 189621 - DNA, 13 bp, Unknown
  misc_feature (1)..( 13): Result.005 file - promoters50/4768265
acatattaggact

SEQ ID NO: 189622 - DNA, 13 bp, Unknown
  misc_feature (1)..( 13): Result.005 file - promoters50/4768265
gttttttaggctt

SEQ ID NO: 189623 - DNA, 10 bp, Unknown
  misc_feature (1)..( 10): Result.005 file - promoters50/4768265
cctaatttgc

SEQ ID NO: 189624 - DNA, 10 bp, Unknown
  misc_feature (1)..( 10): Result.005 file - promoters50/4768265
tataatttac

SEQ ID NO: 189625 - DNA, 10 bp, Unknown
  misc_feature (1)..( 10): Result.005 file - promoters50/4768265
aagaatttgt

SEQ ID NO: 189626 - DNA, 10 bp, Unknown
  misc_feature (1)..( 10): Result.005 file - promoters50/4768265
ataaatgtgt

SEQ ID NO: 189627 - DNA, 10 bp, Unknown
  misc_feature (1)..( 10): Result.005 file - promoters50/4768265
agaaattgcg

SEQ ID NO: 189628 - DNA, 10 bp, Unknown
  misc_feature (1)..( 10): Result.005 file - promoters50/4768265
ctgaattgca

SEQ ID NO: 189629 - DNA, 12 bp, Unknown
  misc_feature (1)..( 12): Result.005 file - promoters50/4768265
gtcaagtttgag

SEQ ID NO: 189630 - DNA, 12 bp, Unknown
  misc_feature (1)..( 12): Result.005 file - promoters50/4768265
atcaattttgct

SEQ ID NO: 189631 - DNA, 12 bp, Unknown
  misc_feature (1)..( 12): Result.005 file - promoters50/4768265
gaagagtctgat

SEQ ID NO: 189632 - DNA, 12 bp, Unknown
  misc_feature (1)..( 12): Result.005 file - promoters50/4768265
actaattttaat

SEQ ID NO: 189633 - DNA, 12 bp, Unknown
  misc_feature (1)..( 12): Result.005 file - promoters50/4768265
atcatttttttc

SEQ ID NO: 189634 - DNA, 12 bp, Unknown
  misc_feature (1)..( 12): Result.005 file - promoters50/4768265
gacgagcctgat

SEQ ID NO: 189635 - DNA, 9 bp, Unknown
  misc_feature (1)..( 9): Result.005 file - promoters50/4768265
aaaacattg

SEQ ID NO: 189636 - DNA, 9 bp, Unknown
  misc_feature (1)..( 9): Result.005 file - promoters50/4768265
aaaacagtg

SEQ ID NO: 189637 - DNA, 9 bp, Unknown
  misc_feature (1)..( 9): Result.005 file - promoters50/4768265
aaaaaattc

SEQ ID NO: 189638 - DNA, 9 bp, Unknown
  misc_feature (1)..( 9): Result.005 file - promoters50/4768265
aaaacattg

SEQ ID NO: 189639 - DNA, 9 bp, Unknown
  misc_feature (1)..( 9): Result.005 file - promoters50/4768265
aaaataata

SEQ ID NO: 189640 - DNA, 9 bp, Unknown
  misc_feature (1)..( 9): Result.005 file - promoters50/4768265
ttaacattt

SEQ ID NO: 189641 - DNA, 11 bp, Unknown
  misc_feature (1)..( 11): Result.005 file - promoters50/4768285
attacataatt

SEQ ID NO: 189642 - DNA, 11 bp, Unknown
  misc_feature (1)..( 11): Result.005 file - promoters50/4768285
attacaaaata

SEQ ID NO: 189643 - DNA, 11 bp, Unknown
  misc_feature (1)..( 11): Result.005 file - promoters50/4768285
ttttaataatt

SEQ ID NO: 189644 - DNA, 11 bp, Unknown
  misc_feature (1)..( 11): Result.005 file - promoters50/4768285
gctaaaaatcc

SEQ ID NO: 189645 - DNA, 11 bp, Unknown
  misc_feature (1)..( 11): Result.005 file - promoters50/4768285
actaaaaaggt

SEQ ID NO: 189646 - DNA, 11 bp, Unknown
  misc_feature (1)..( 11): Result.005 file - promoters50/4768285
aataaataata

SEQ ID NO: 189647 - DNA, 9 bp, Unknown
  misc_feature (1)..( 9): Result.005 file - promoters50/4768289
gtttattaa

SEQ ID NO: 189648 - DNA, 9 bp, Unknown
  misc_feature (1)..( 9): Result.005 file - promoters50/4768289
atttattaa

SEQ ID NO: 189649 - DNA, 9 bp, Unknown
  misc_feature (1)..( 9): Result.005 file - promoters50/4768289
gtttatgaa

SEQ ID NO: 189650 - DNA, 7 bp, Unknown
  misc_feature (1)..( 7): Result.005 file - promoters50/4768289
tgagatt

SEQ ID NO: 189651 - DNA, 7 bp, Unknown
  misc_feature (1)..( 7): Result.005 file - promoters50/4768289
cgagatt

SEQ ID NO: 189652 - DNA, 7 bp, Unknown
  misc_feature (1)..( 7): Result.005 file - promoters50/4768289
cgagatc

SEQ ID NO: 189653 - DNA, 8 bp, Unknown
  misc_feature (1)..( 8): Result.005 file - promoters50/4768293
cattttgt

SEQ ID NO: 189654 - DNA, 8 bp, Unknown
  misc_feature (1)..( 8): Result.005 file - promoters50/4768293
cattttca

SEQ ID NO: 189655 - DNA, 8 bp, Unknown
  misc_feature (1)..( 8): Result.005 file - promoters50/4768293
gattctca

SEQ ID NO: 189656 - DNA, 10 bp, Unknown
  misc_feature (1)..( 10): Result.005 file - promoters50/4768293
ttttacagat

SEQ ID NO: 189657 - DNA, 10 bp, Unknown
  misc_feature (1)..( 10): Result.005 file - promoters50/4768293
attttcagat

SEQ ID NO: 189658 - DNA, 10 bp, Unknown
  misc_feature (1)..( 10): Result.005 file - promoters50/4768293
attctcaccc

SEQ ID NO: 189659 - DNA, 9 bp, Unknown
  misc_feature (1)..( 9): Result.005 file - promoters50/4768300
acaagatta

SEQ ID NO: 189660 - DNA, 9 bp, Unknown
  misc_feature (1)..( 9): Result.005 file - promoters50/4768300
ctaagatta

SEQ ID NO: 189661 - DNA, 9 bp, Unknown
  misc_feature (1)..( 9): Result.005 file - promoters50/4768300
acatgattt

SEQ ID NO: 189662 - DNA, 9 bp, Unknown
  misc_feature (1)..( 9): Result.005 file - promoters50/4768300
ttttcttaa

SEQ ID NO: 189663 - DNA, 9 bp, Unknown
  misc_feature (1)..( 9): Result.005 file - promoters50/4768300
tttacttaa

SEQ ID NO: 189664 - DNA, 9 bp, Unknown
  misc_feature (1)..( 9): Result.005 file - promoters50/4768300
attactttt

SEQ ID NO: 189665 - DNA, 16 bp, Unknown
  misc_feature (1)..( 16): Result.005 file - promoters50/4768319
cattttctttttgtag

SEQ ID NO: 189666 - DNA, 16 bp, Unknown
  misc_feature (1)..( 16): Result.005 file - promoters50/4768319
catcttcctttgtctc

SEQ ID NO: 189667 - DNA, 16 bp, Unknown
  misc_feature (1)..( 16): Result.005 file - promoters50/4768319
attcttcgtttgttaa

SEQ ID NO: 189668 - DNA, 16 bp, Unknown
  misc_feature (1)..( 16): Result.005 file - promoters50/4768319
ctttttctgatcgacg

SEQ ID NO: 189669 - DNA, 16 bp, Unknown
  misc_feature (1)..( 16): Result.005 file - promoters50/4768319
ccgaatctgtttgtag

SEQ ID NO: 189670 - DNA, 16 bp, Unknown
  misc_feature (1)..( 16): Result.005 file - promoters50/4768319
actcttcgtcaataaa

SEQ ID NO: 189671 - DNA, 13 bp, Unknown
  misc_feature (1)..( 13): Result.005 file - promoters50/4768319
atagacaattgta

SEQ ID NO: 189672 - DNA, 13 bp, Unknown
  misc_feature (1)..( 13): Result.005 file - promoters50/4768319
gtagataattgtt

SEQ ID NO: 189673 - DNA, 13 bp, Unknown
  misc_feature (1)..( 13): Result.005 file - promoters50/4768319
aatgacaaatgtc

SEQ ID NO: 189674 - DNA, 13 bp, Unknown
  misc_feature (1)..( 13): Result.005 file - promoters50/4768319
atatacaattgtc

SEQ ID NO: 189675 - DNA, 13 bp, Unknown
  misc_feature (1)..( 13): Result.005 file - promoters50/4768319
acagataagtctt

SEQ ID NO: 189676 - DNA, 13 bp, Unknown
  misc_feature (1)..( 13): Result.005 file - promoters50/4768319
gttggatattgtt

SEQ ID NO: 189677 - DNA, 12 bp, Unknown
  misc_feature (1)..( 12): Result.005 file - promoters50/4768319
ttttaaaatttg

SEQ ID NO: 189678 - DNA, 12 bp, Unknown
  misc_feature (1)..( 12): Result.005 file - promoters50/4768319
attacaaatttt

SEQ ID NO: 189679 - DNA, 12 bp, Unknown
  misc_feature (1)..( 12): Result.005 file - promoters50/4768319
agataagattca

SEQ ID NO: 189680 - DNA, 12 bp, Unknown
  misc_feature (1)..( 12): Result.005 file - promoters50/4768319
aaaaaaaattgt

SEQ ID NO: 189681 - DNA, 12 bp, Unknown
  misc_feature (1)..( 12): Result.005 file - promoters50/4768319
ttttataatctt

SEQ ID NO: 189682 - DNA, 12 bp, Unknown
  misc_feature (1)..( 12): Result.005 file - promoters50/4768319
attaaaaaaaaa

SEQ ID NO: 189683 - DNA, 11 bp, Unknown
  misc_feature (1)..( 11): Result.005 file - promoters50/4768319
actcattttta

SEQ ID NO: 189684 - DNA, 11 bp, Unknown
  misc_feature (1)..( 11): Result.005 file - promoters50/4768319
tttcacttttc

SEQ ID NO: 189685 - DNA, 11 bp, Unknown
  misc_feature (1)..( 11): Result.005 file - promoters50/4768319
gattattatta

SEQ ID NO: 189686 - DNA, 11 bp, Unknown
  misc_feature (1)..( 11): Result.005 file - promoters50/4768319
tcacatattta

SEQ ID NO: 189687 - DNA, 11 bp, Unknown
  misc_feature (1)..( 11): Result.005 file - promoters50/4768319
tttcaatttca

SEQ ID NO: 189688 - DNA, 11 bp, Unknown
  misc_feature (1)..( 11): Result.005 file - promoters50/4768319
ttacaaatttt

SEQ ID NO: 189689 - DNA, 11 bp, Unknown
  misc_feature (1)..( 11): Result.005 file - promoters50/4768319
tttcactaaac

SEQ ID NO: 189690 - DNA, 9 bp, Unknown
  misc_feature (1)..( 9): Result.005 file - promoters50/4768319
taaaaaaac

SEQ ID NO: 189691 - DNA, 9 bp, Unknown
  misc_feature (1)..( 9): Result.005 file - promoters50/4768319
taaacaaat

SEQ ID NO: 189692 - DNA, 9 bp, Unknown
  misc_feature (1)..( 9): Result.005 file - promoters50/4768319
taataaata

SEQ ID NO: 189693 - DNA, 9 bp, Unknown
  misc_feature (1)..( 9): Result.005 file - promoters50/4768319
aaaacaaat

SEQ ID NO: 189694 - DNA, 9 bp, Unknown
  misc_feature (1)..( 9): Result.005 file - promoters50/4768319
caaaaactc

SEQ ID NO: 189695 - DNA, 9 bp, Unknown
  misc_feature (1)..( 9): Result.005 file - promoters50/4768319
taaacattt

SEQ ID NO: 189696 - DNA, 9 bp, Unknown
  misc_feature (1)..( 9): Result.005 file - promoters50/4768319
gaaacgaat

SEQ ID NO: 189697 - DNA, 7 bp, Unknown
  misc_feature (1)..( 7): Result.005 file - promoters50/4768323
ctttttc

SEQ ID NO: 189698 - DNA, 7 bp, Unknown
  misc_feature (1)..( 7): Result.005 file - promoters50/4768323
ctttttt

SEQ ID NO: 189699 - DNA, 7 bp, Unknown
  misc_feature (1)..( 7): Result.005 file - promoters50/4768323
gtttttc

SEQ ID NO: 189700 - DNA, 8 bp, Unknown
  misc_feature (1)..( 8): Result.005 file - promoters50/4768323
tttgttat

SEQ ID NO: 189701 - DNA, 8 bp, Unknown
  misc_feature (1)..( 8): Result.005 file - promoters50/4768323
tttcttat

SEQ ID NO: 189702 - DNA, 8 bp, Unknown
  misc_feature (1)..( 8): Result.005 file - promoters50/4768323
ttttttaa

SEQ ID NO: 189703 - DNA, 7 bp, Unknown
  misc_feature (1)..( 7): Result.005 file - promoters50/4768323
ttgatca

SEQ ID NO: 189704 - DNA, 7 bp, Unknown
  misc_feature (1)..( 7): Result.005 file - promoters50/4768323
ttggtca

SEQ ID NO: 189705 - DNA, 7 bp, Unknown
  misc_feature (1)..( 7): Result.005 file - promoters50/4768323
ttggtct

SEQ ID NO: 189706 - DNA, 7 bp, Unknown
  misc_feature (1)..( 7): Result.005 file - promoters50/4768323
ttttctg

SEQ ID NO: 189707 - DNA, 7 bp, Unknown
  misc_feature (1)..( 7): Result.005 file - promoters50/4768323
tttactg

SEQ ID NO: 189708 - DNA, 7 bp, Unknown
  misc_feature (1)..( 7): Result.005 file - promoters50/4768323
ttttctg

SEQ ID NO: 189709 - DNA, 13 bp, Unknown
  misc_feature (1)..( 13): Result.005 file - promoters50/4768346
aaaatatctgaaa

SEQ ID NO: 189710 - DNA, 13 bp, Unknown
  misc_feature (1)..( 13): Result.005 file - promoters50/4768346
tatatatatgaaa

SEQ ID NO: 189711 - DNA, 13 bp, Unknown
  misc_feature (1)..( 13): Result.005 file - promoters50/4768346
aaaatttctgtat

SEQ ID NO: 189712 - DNA, 13 bp, Unknown
  misc_feature (1)..( 13): Result.005 file - promoters50/4768346
aagaataatgaaa

SEQ ID NO: 189713 - DNA, 13 bp, Unknown
  misc_feature (1)..( 13): Result.005 file - promoters50/4768346
gctttttctgttc

SEQ ID NO: 189714 - DNA, 9 bp, Unknown
  misc_feature (1)..( 9): Result.005 file - promoters50/4768350
gttttggat

SEQ ID NO: 189715 - DNA, 9 bp, Unknown
  misc_feature (1)..( 9): Result.005 file - promoters50/4768350
gtttttgat

SEQ ID NO: 189716 - DNA, 9 bp, Unknown
  misc_feature (1)..( 9): Result.005 file - promoters50/4768350
atttttgaa

SEQ ID NO: 189717 - DNA, 9 bp, Unknown
  misc_feature (1)..( 9): Result.005 file - promoters50/4768350
tatttttct

SEQ ID NO: 189718 - DNA, 9 bp, Unknown
  misc_feature (1)..( 9): Result.005 file - promoters50/4768350
agtttgtct

SEQ ID NO: 189719 - DNA, 9 bp, Unknown
  misc_feature (1)..( 9): Result.005 file - promoters50/4768350
agtgtgtat

SEQ ID NO: 189720 - DNA, 8 bp, Unknown
  misc_feature (1)..( 8): Result.005 file - promoters50/4768350
tgaatttt

SEQ ID NO: 189721 - DNA, 8 bp, Unknown
  misc_feature (1)..( 8): Result.005 file - promoters50/4768350
tgagtttt

SEQ ID NO: 189722 - DNA, 8 bp, Unknown
  misc_feature (1)..( 8): Result.005 file - promoters50/4768350
tgagtttg

SEQ ID NO: 189723 - DNA, 10 bp, Unknown
  misc_feature (1)..( 10): Result.005 file - promoters50/4768354
agaatttttt

SEQ ID NO: 189724 - DNA, 9 bp, Unknown
  misc_feature (1)..( 9): Result.005 file - promoters50/4768354
aaattttta

SEQ ID NO: 189725 - DNA, 10 bp, Unknown
  misc_feature (1)..( 10): Result.005 file - promoters50/4768354
aagatttttg

SEQ ID NO: 189726 - DNA, 10 bp, Unknown
  misc_feature (1)..( 10): Result.005 file - promoters50/4768354
ttcctttttt

SEQ ID NO: 189727 - DNA, 10 bp, Unknown
  misc_feature (1)..( 10): Result.005 file - promoters50/4768354
agactttggg

SEQ ID NO: 189728 - DNA, 11 bp, Unknown
  misc_feature (1)..( 11): Result.005 file - promoters50/4768354
agaattttttt

SEQ ID NO: 189729 - DNA, 11 bp, Unknown
  misc_feature (1)..( 11): Result.005 file - promoters50/4768354
taacatttttt

SEQ ID NO: 189730 - DNA, 11 bp, Unknown
  misc_feature (1)..( 11): Result.005 file - promoters50/4768354
attcctttttt

SEQ ID NO: 189731 - DNA, 11 bp, Unknown
  misc_feature (1)..( 11): Result.005 file - promoters50/4768354
taagatttttg

SEQ ID NO: 189732 - DNA, 9 bp, Unknown
  misc_feature (1)..( 9): Result.005 file - promoters50/4768354
gttattcga

SEQ ID NO: 189733 - DNA, 9 bp, Unknown
  misc_feature (1)..( 9): Result.005 file - promoters50/4768354
tttattcag

SEQ ID NO: 189734 - DNA, 9 bp, Unknown
  misc_feature (1)..( 9): Result.005 file - promoters50/4768354
tttaatcag

SEQ ID NO: 189735 - DNA, 9 bp, Unknown
  misc_feature (1)..( 9): Result.005 file - promoters50/4768354
tttaatgta

SEQ ID NO: 189736 - DNA, 8 bp, Unknown
  misc_feature (1)..( 8): Result.005 file - promoters50/4768354
taatcatc

SEQ ID NO: 189737 - DNA, 8 bp, Unknown
  misc_feature (1)..( 8): Result.005 file - promoters50/4768354
aaatcatg

SEQ ID NO: 189738 - DNA, 9 bp, Unknown
  misc_feature (1)..( 9): Result.005 file - promoters50/4768354
aaattcaaa

SEQ ID NO: 189739 - DNA, 9 bp, Unknown
  misc_feature (1)..( 9): Result.005 file - promoters50/4768354
agtatcatg

SEQ ID NO: 189740 - DNA, 7 bp, Unknown
  misc_feature (1)..( 7): Result.005 file - promoters50/4768444
gccttct

SEQ ID NO: 189741 - DNA, 7 bp, Unknown
  misc_feature (1)..( 7): Result.005 file - promoters50/4768444
accttct

SEQ ID NO: 189742 - DNA, 7 bp, Unknown
  misc_feature (1)..( 7): Result.005 file - promoters50/4768444
accctct

SEQ ID NO: 189743 - DNA, 7 bp, Unknown
  misc_feature (1)..( 7): Result.005 file - promoters50/4768444
tatctta

SEQ ID NO: 189744 - DNA, 7 bp, Unknown
  misc_feature (1)..( 7): Result.005 file - promoters50/4768444
tatttta

SEQ ID NO: 189745 - DNA, 7 bp, Unknown
  misc_feature (1)..( 7): Result.005 file - promoters50/4768444
tctcttt

SEQ ID NO: 189746 - DNA, 6 bp, Unknown
  misc_feature (1)..( 6): Result.005 file - promoters50/4768478
gagctt

SEQ ID NO: 189747 - DNA, 7 bp, Unknown
  misc_feature (1)..( 7): Result.005 file - promoters50/4768478
tgagctt

SEQ ID NO: 189748 - DNA, 7 bp, Unknown
  misc_feature (1)..( 7): Result.005 file - promoters50/4768478
tgagctt

SEQ ID NO: 189749 - DNA, 10 bp, Unknown
  misc_feature (1)..( 10): Result.005 file - promoters50/4768478
aaaactaatt

SEQ ID NO: 189750 - DNA, 10 bp, Unknown
  misc_feature (1)..( 10): Result.005 file - promoters50/4768478
gaaacaaatt

SEQ ID NO: 189751 - DNA, 10 bp, Unknown
  misc_feature (1)..( 10): Result.005 file - promoters50/4768478
gaaacactct

SEQ ID NO: 189752 - DNA, 7 bp, Unknown
  misc_feature (1)..( 7): Result.005 file - promoters50/4768499
atcgtct

SEQ ID NO: 189753 - DNA, 7 bp, Unknown
  misc_feature (1)..( 7): Result.005 file - promoters50/4768499
atcctct

SEQ ID NO: 189754 - DNA, 7 bp, Unknown
  misc_feature (1)..( 7): Result.005 file - promoters50/4768499
ttcctct

SEQ ID NO: 189755 - DNA, 11 bp, Unknown
  misc_feature (1)..( 11): Result.005 file - promoters50/4768499
aagcttgggtt

SEQ ID NO: 189756 - DNA, 11 bp, Unknown
  misc_feature (1)..( 11): Result.005 file - promoters50/4768499
aagtttgcgtt

SEQ ID NO: 189757 - DNA, 11 bp, Unknown
  misc_feature (1)..( 11): Result.005 file - promoters50/4768499
aagtttagaat

SEQ ID NO: 189758 - DNA, 9 bp, Unknown
  misc_feature (1)..( 9): Result.005 file - promoters50/4768514
gctttcgtg

SEQ ID NO: 189759 - DNA, 9 bp, Unknown
  misc_feature (1)..( 9): Result.005 file - promoters50/4768514
gttttagtg

SEQ ID NO: 189760 - DNA, 9 bp, Unknown
  misc_feature (1)..( 9): Result.005 file - promoters50/4768514
gctctcgga

SEQ ID NO: 189761 - DNA, 13 bp, Unknown
  misc_feature (1)..( 13): Result.005 file - promoters50/4768520
ggtttttattttc

SEQ ID NO: 189762 - DNA, 13 bp, Unknown
  misc_feature (1)..( 13): Result.005 file - promoters50/4768520
agttattaatcac

SEQ ID NO: 189763 - DNA, 13 bp, Unknown
  misc_feature (1)..( 13): Result.005 file - promoters50/4768520
ggtatttatattc

SEQ ID NO: 189764 - DNA, 13 bp, Unknown
  misc_feature (1)..( 13): Result.005 file - promoters50/4768520
ggtttttattttc

SEQ ID NO: 189765 - DNA, 13 bp, Unknown
  misc_feature (1)..( 13): Result.005 file - promoters50/4768520
aaactttattaaa

SEQ ID NO: 189766 - DNA, 13 bp, Unknown
  misc_feature (1)..( 13): Result.005 file - promoters50/4768520
ggtatttatattc

SEQ ID NO: 189767 - DNA, 9 bp, Unknown
  misc_feature (1)..( 9): Result.005 file - promoters50/4768528
aaaatttct

SEQ ID NO: 189768 - DNA, 9 bp, Unknown
  misc_feature (1)..( 9): Result.005 file - promoters50/4768528
aaactttaa

SEQ ID NO: 189769 - DNA, 9 bp, Unknown
  misc_feature (1)..( 9): Result.005 file - promoters50/4768528
aaaatctct

SEQ ID NO: 189770 - DNA, 8 bp, Unknown
  misc_feature (1)..( 8): Result.005 file - promoters50/4768528
tgtgaaac

SEQ ID NO: 189771 - DNA, 8 bp, Unknown
  misc_feature (1)..( 8): Result.005 file - promoters50/4768528
tttgaaac

SEQ ID NO: 189772 - DNA, 8 bp, Unknown
  misc_feature (1)..( 8): Result.005 file - promoters50/4768528
tgtgaaaa

SEQ ID NO: 189773 - DNA, 9 bp, Unknown
  misc_feature (1)..( 9): Result.005 file - promoters50/4768528
aaaatttct

SEQ ID NO: 189774 - DNA, 9 bp, Unknown
  misc_feature (1)..( 9): Result.005 file - promoters50/4768528
gatatttct

SEQ ID NO: 189775 - DNA, 9 bp, Unknown
  misc_feature (1)..( 9): Result.005 file - promoters50/4768528
aaaatctct

SEQ ID NO: 189776 - DNA, 9 bp, Unknown
  misc_feature (1)..( 9): Result.005 file - promoters50/4768528
tatcaaaat

SEQ ID NO: 189777 - DNA, 9 bp, Unknown
  misc_feature (1)..( 9): Result.005 file - promoters50/4768528
tttcaaaat

SEQ ID NO: 189778 - DNA, 9 bp, Unknown
  misc_feature (1)..( 9): Result.005 file - promoters50/4768528
ttttaaaat

SEQ ID NO: 189779 - DNA, 15 bp, Unknown
  misc_feature (1)..( 15): Result.005 file - promoters50/4768532
atccttcaagataat

SEQ ID NO: 189780 - DNA, 15 bp, Unknown
  misc_feature (1)..( 15): Result.005 file - promoters50/4768532
gctacacaatataca

SEQ ID NO: 189781 - DNA, 15 bp, Unknown
  misc_feature (1)..( 15): Result.005 file - promoters50/4768532
accaatttagataaa

SEQ ID NO: 189782 - DNA, 15 bp, Unknown
  misc_feature (1)..( 15): Result.005 file - promoters50/4768532
ttaggtaaatatctt

SEQ ID NO: 189783 - DNA, 15 bp, Unknown
  misc_feature (1)..( 15): Result.005 file - promoters50/4768532
aataataaatattac

SEQ ID NO: 189784 - DNA, 15 bp, Unknown
  misc_feature (1)..( 15): Result.005 file - promoters50/4768532
cctcagcgatagaca

SEQ ID NO: 189785 - DNA, 6 bp, Unknown
  misc_feature (1)..( 6): Result.005 file - promoters50/4768539
tgttat

SEQ ID NO: 189786 - DNA, 6 bp, Unknown
  misc_feature (1)..( 6): Result.005 file - promoters50/4768539
tgttat

SEQ ID NO: 189787 - DNA, 6 bp, Unknown
  misc_feature (1)..( 6): Result.005 file - promoters50/4768539
tgttat

SEQ ID NO: 189788 - DNA, 7 bp, Unknown
  misc_feature (1)..( 7): Result.005 file - promoters50/4768539
aaataac

SEQ ID NO: 189789 - DNA, 7 bp, Unknown
  misc_feature (1)..( 7): Result.005 file - promoters50/4768539
taataac

SEQ ID NO: 189790 - DNA, 7 bp, Unknown
  misc_feature (1)..( 7): Result.005 file - promoters50/4768539
aaataag

SEQ ID NO: 189791 - DNA, 9 bp, Unknown
  misc_feature (1)..( 9): Result.005 file - promoters50/4768539
ggacacata

SEQ ID NO: 189792 - DNA, 9 bp, Unknown
  misc_feature (1)..( 9): Result.005 file - promoters50/4768539
ggacacata

SEQ ID NO: 189793 - DNA, 9 bp, Unknown
  misc_feature (1)..( 9): Result.005 file - promoters50/4768539
aaacaaaat

SEQ ID NO: 189794 - DNA, 9 bp, Unknown
  misc_feature (1)..( 9): Result.005 file - promoters50/4768539
ttacaaaat

SEQ ID NO: 189795 - DNA, 6 bp, Unknown
  misc_feature (1)..( 6): Result.005 file - promoters50/4768539
aaaaca

SEQ ID NO: 189796 - DNA, 6 bp, Unknown
  misc_feature (1)..( 6): Result.005 file - promoters50/4768539
aaaaca

SEQ ID NO: 189797 - DNA, 6 bp, Unknown
  misc_feature (1)..( 6): Result.005 file - promoters50/4768539
aaaaca

SEQ ID NO: 189798 - DNA, 23 bp, Unknown
  misc_feature (1)..( 23): Result.005 file - promoters50/4768539
gataaaaatcaagcttcacctaa

SEQ ID NO: 189799 - DNA, 23 bp, Unknown
  misc_feature (1)..( 23): Result.005 file - promoters50/4768539
gataaaaaacgctagaaggaggg

SEQ ID NO: 189800 - DNA, 23 bp, Unknown
  misc_feature (1)..( 23): Result.005 file - promoters50/4768539
atgaaaaatcaaacttcatctaa

SEQ ID NO: 189801 - DNA, 8 bp, Unknown
  misc_feature (1)..( 8): Result.005 file - promoters50/4768539
tttctcac

SEQ ID NO: 189802 - DNA, 8 bp, Unknown
  misc_feature (1)..( 8): Result.005 file - promoters50/4768539
tttatcac

SEQ ID NO: 189803 - DNA, 8 bp, Unknown
  misc_feature (1)..( 8): Result.005 file - promoters50/4768539
tttatcca

SEQ ID NO: 189804 - DNA, 9 bp, Unknown
  misc_feature (1)..( 9): Result.005 file - promoters50/4768539
cattgcttt

SEQ ID NO: 189805 - DNA, 9 bp, Unknown
  misc_feature (1)..( 9): Result.005 file - promoters50/4768539
aattgtttt

SEQ ID NO: 189806 - DNA, 9 bp, Unknown
  misc_feature (1)..( 9): Result.005 file - promoters50/4768539
aattgtact

SEQ ID NO: 189807 - DNA, 14 bp, Unknown
  misc_feature (1)..( 14): Result.005 file - promoters50/4768547
tactttatatatta

SEQ ID NO: 189808 - DNA, 14 bp, Unknown
  misc_feature (1)..( 14): Result.005 file - promoters50/4768547
tttaagatatttta

SEQ ID NO: 189809 - DNA, 14 bp, Unknown
  misc_feature (1)..( 14): Result.005 file - promoters50/4768547
acttaaatatcgtc

SEQ ID NO: 189810 - DNA, 14 bp, Unknown
  misc_feature (1)..( 14): Result.005 file - promoters50/4768547
ctttctataatata

SEQ ID NO: 189811 - DNA, 14 bp, Unknown
  misc_feature (1)..( 14): Result.005 file - promoters50/4768547
acttaaaccaatga

SEQ ID NO: 189812 - DNA, 14 bp, Unknown
  misc_feature (1)..( 14): Result.005 file - promoters50/4768547
agataattattctc

SEQ ID NO: 189813 - DNA, 11 bp, Unknown
  misc_feature (1)..( 11): Result.005 file - promoters50/4768547
actttatatat

SEQ ID NO: 189814 - DNA, 11 bp, Unknown
  misc_feature (1)..( 11): Result.005 file - promoters50/4768547
attttatagaa

SEQ ID NO: 189815 - DNA, 11 bp, Unknown
  misc_feature (1)..( 11): Result.005 file - promoters50/4768547
gacttaaatat

SEQ ID NO: 189816 - DNA, 11 bp, Unknown
  misc_feature (1)..( 11): Result.005 file - promoters50/4768547
cctttctataa

SEQ ID NO: 189817 - DNA, 11 bp, Unknown
  misc_feature (1)..( 11): Result.005 file - promoters50/4768547
aacttaaacca

SEQ ID NO: 189818 - DNA, 11 bp, Unknown
  misc_feature (1)..( 11): Result.005 file - promoters50/4768547
taattattctc

SEQ ID NO: 189819 - DNA, 8 bp, Unknown
  misc_feature (1)..( 8): Result.005 file - promoters50/4768547
atttggtt

SEQ ID NO: 189820 - DNA, 8 bp, Unknown
  misc_feature (1)..( 8): Result.005 file - promoters50/4768547
atttggtg

SEQ ID NO: 189821 - DNA, 8 bp, Unknown
  misc_feature (1)..( 8): Result.005 file - promoters50/4768547
tttttgtt

SEQ ID NO: 189822 - DNA, 8 bp, Unknown
  misc_feature (1)..( 8): Result.005 file - promoters50/4768547
tttttgta

SEQ ID NO: 189823 - DNA, 8 bp, Unknown
  misc_feature (1)..( 8): Result.005 file - promoters50/4768547
tttttggg

SEQ ID NO: 189824 - DNA, 8 bp, Unknown
  misc_feature (1)..( 8): Result.005 file - promoters50/4768547
attcggtg

SEQ ID NO: 189825 - DNA, 7 bp, Unknown
  misc_feature (1)..( 7): Result.005 file - promoters50/4768558
ttaaaat

SEQ ID NO: 189826 - DNA, 7 bp, Unknown
  misc_feature (1)..( 7): Result.005 file - promoters50/4768558
ttaaaat

SEQ ID NO: 189827 - DNA, 7 bp, Unknown
  misc_feature (1)..( 7): Result.005 file - promoters50/4768558
ttaaaat

SEQ ID NO: 189828 - DNA, 7 bp, Unknown
  misc_feature (1)..( 7): Result.005 file - promoters50/4768558
aaaatta

SEQ ID NO: 189829 - DNA, 7 bp, Unknown
  misc_feature (1)..( 7): Result.005 file - promoters50/4768558
taaatta

SEQ ID NO: 189830 - DNA, 7 bp, Unknown
  misc_feature (1)..( 7): Result.005 file - promoters50/4768558
aaaattc

SEQ ID NO: 189831 - DNA, 10 bp, Unknown
  misc_feature (1)..( 10): Result.005 file - promoters50/4768558
ggttaattag

SEQ ID NO: 189832 - DNA, 10 bp, Unknown
  misc_feature (1)..( 10): Result.005 file - promoters50/4768558
aaataattaa

SEQ ID NO: 189833 - DNA, 10 bp, Unknown
  misc_feature (1)..( 10): Result.005 file - promoters50/4768558
aaaaaattaa

SEQ ID NO: 189834 - DNA, 8 bp, Unknown
  misc_feature (1)..( 8): Result.005 file - promoters50/4768558
taatttaa

SEQ ID NO: 189835 - DNA, 8 bp, Unknown
  misc_feature (1)..( 8): Result.005 file - promoters50/4768558
aaatataa

SEQ ID NO: 189836 - DNA, 8 bp, Unknown
  misc_feature (1)..( 8): Result.005 file - promoters50/4768558
ttatataa

SEQ ID NO: 189837 - DNA, 8 bp, Unknown
  misc_feature (1)..( 8): Result.005 file - promoters50/4768558
aaatattc

SEQ ID NO: 189838 - DNA, 11 bp, Unknown
  misc_feature (1)..( 11): Result.005 file - promoters50/4768558
aactaaaatta

SEQ ID NO: 189839 - DNA, 11 bp, Unknown
  misc_feature (1)..( 11): Result.005 file - promoters50/4768558
aaccaaaaatt

SEQ ID NO: 189840 - DNA, 11 bp, Unknown
  misc_feature (1)..( 11): Result.005 file - promoters50/4768558
tctcaaaaatt

SEQ ID NO: 189841 - DNA, 12 bp, Unknown
  misc_feature (1)..( 12): Result.005 file - promoters50/4768568
gaggattaaagg

SEQ ID NO: 189842 - DNA, 12 bp, Unknown
  misc_feature (1)..( 12): Result.005 file - promoters50/4768568
attaattaaatt

SEQ ID NO: 189843 - DNA, 12 bp, Unknown
  misc_feature (1)..( 12): Result.005 file - promoters50/4768568
gccgatgaaagt

SEQ ID NO: 189844 - DNA, 12 bp, Unknown
  misc_feature (1)..( 12): Result.005 file - promoters50/4768568
taggactaatta

SEQ ID NO: 189845 - DNA, 12 bp, Unknown
  misc_feature (1)..( 12): Result.005 file - promoters50/4768568
cgttatttaata

SEQ ID NO: 189846 - DNA, 12 bp, Unknown
  misc_feature (1)..( 12): Result.005 file - promoters50/4768568
actgatttttca

SEQ ID NO: 189847 - DNA, 12 bp, Unknown
  misc_feature (1)..( 12): Result.005 file - promoters50/4768568
aaagttttgata

SEQ ID NO: 189848 - DNA, 11 bp, Unknown
  misc_feature (1)..( 11): Result.005 file - promoters50/4768568
ctttgattagc

SEQ ID NO: 189849 - DNA, 11 bp, Unknown
  misc_feature (1)..( 11): Result.005 file - promoters50/4768568
tttttattttt

SEQ ID NO: 189850 - DNA, 12 bp, Unknown
  misc_feature (1)..( 12): Result.005 file - promoters50/4768568
ccattactttac

SEQ ID NO: 189851 - DNA, 12 bp, Unknown
  misc_feature (1)..( 12): Result.005 file - promoters50/4768568
tttttagtttgt

SEQ ID NO: 189852 - DNA, 12 bp, Unknown
  misc_feature (1)..( 12): Result.005 file - promoters50/4768568
acattgcttcgt

SEQ ID NO: 189853 - DNA, 12 bp, Unknown
  misc_feature (1)..( 12): Result.005 file - promoters50/4768568
caacaactatac

SEQ ID NO: 189854 - DNA, 12 bp, Unknown
  misc_feature (1)..( 12): Result.005 file - promoters50/4768568
catttagtcatt

SEQ ID NO: 189855 - DNA, 9 bp, Unknown
  misc_feature (1)..( 9): Result.005 file - promoters50/4768568
cctaaaagc

SEQ ID NO: 189856 - DNA, 9 bp, Unknown
  misc_feature (1)..( 9): Result.005 file - promoters50/4768568
actaaaaaa

SEQ ID NO: 189857 - DNA, 9 bp, Unknown
  misc_feature (1)..( 9): Result.005 file - promoters50/4768568
gataaaagc

SEQ ID NO: 189858 - DNA, 10 bp, Unknown
  misc_feature (1)..( 10): Result.005 file - promoters50/4768568
aataagaaat

SEQ ID NO: 189859 - DNA, 10 bp, Unknown
  misc_feature (1)..( 10): Result.005 file - promoters50/4768568
aataagacaa

SEQ ID NO: 189860 - DNA, 10 bp, Unknown
  misc_feature (1)..( 10): Result.005 file - promoters50/4768568
tttaaaaaag

SEQ ID NO: 189861 - DNA, 13 bp, Unknown
  misc_feature (1)..( 13): Result.005 file - promoters50/4768599
tattaataatttt

SEQ ID NO: 189862 - DNA, 13 bp, Unknown
  misc_feature (1)..( 13): Result.005 file - promoters50/4768599
atttaatacgttt

SEQ ID NO: 189863 - DNA, 13 bp, Unknown
  misc_feature (1)..( 13): Result.005 file - promoters50/4768599
tattaagaatttg

SEQ ID NO: 189864 - DNA, 13 bp, Unknown
  misc_feature (1)..( 13): Result.005 file - promoters50/4768599
acttactaactag

SEQ ID NO: 189865 - DNA, 13 bp, Unknown
  misc_feature (1)..( 13): Result.005 file - promoters50/4768599
aaaagcgaatttg

SEQ ID NO: 189866 - DNA, 15 bp, Unknown
  misc_feature (1)..( 15): Result.005 file - promoters50/4768599
aattttagttattaa

SEQ ID NO: 189867 - DNA, 15 bp, Unknown
  misc_feature (1)..( 15): Result.005 file - promoters50/4768599
atatttggttttacg

SEQ ID NO: 189868 - DNA, 15 bp, Unknown
  misc_feature (1)..( 15): Result.005 file - promoters50/4768599
gaatttgattttcat

SEQ ID NO: 189869 - DNA, 15 bp, Unknown
  misc_feature (1)..( 15): Result.005 file - promoters50/4768599
gaatttgtttgattg

SEQ ID NO: 189870 - DNA, 15 bp, Unknown
  misc_feature (1)..( 15): Result.005 file - promoters50/4768599
ttttttaatttccat

SEQ ID NO: 189871 - DNA, 11 bp, Unknown
  misc_feature (1)..( 11): Result.005 file - promoters50/4768599
tttaattttag

SEQ ID NO: 189872 - DNA, 11 bp, Unknown
  misc_feature (1)..( 11): Result.005 file - promoters50/4768599
tttgattttca

SEQ ID NO: 189873 - DNA, 11 bp, Unknown
  misc_feature (1)..( 11): Result.005 file - promoters50/4768599
tataatattaa

SEQ ID NO: 189874 - DNA, 12 bp, Unknown
  misc_feature (1)..( 12): Result.005 file - promoters50/4768599
tttaaatttttt

SEQ ID NO: 189875 - DNA, 12 bp, Unknown
  misc_feature (1)..( 12): Result.005 file - promoters50/4768599
atttggttttac

SEQ ID NO: 189876 - DNA, 13 bp, Unknown
  misc_feature (1)..( 13): Result.005 file - promoters50/4768599
aattttaataatt

SEQ ID NO: 189877 - DNA, 13 bp, Unknown
  misc_feature (1)..( 13): Result.005 file - promoters50/4768599
aatattacgttta

SEQ ID NO: 189878 - DNA, 13 bp, Unknown
  misc_feature (1)..( 13): Result.005 file - promoters50/4768599
ttgtttaaatttt

SEQ ID NO: 189879 - DNA, 13 bp, Unknown
  misc_feature (1)..( 13): Result.005 file - promoters50/4768599
tatagtacattta

SEQ ID NO: 189880 - DNA, 12 bp, Unknown
  misc_feature (1)..( 12): Result.005 file - promoters50/4768599
aataattttaat

SEQ ID NO: 189881 - DNA, 12 bp, Unknown
  misc_feature (1)..( 12): Result.005 file - promoters50/4768599
tttaatttccat

SEQ ID NO: 189882 - DNA, 12 bp, Unknown
  misc_feature (1)..( 12): Result.005 file - promoters50/4768599
tttgattttcat

SEQ ID NO: 189883 - DNA, 12 bp, Unknown
  misc_feature (1)..( 12): Result.005 file - promoters50/4768599
tttgattgtgtc

SEQ ID NO: 189884 - DNA, 12 bp, Unknown
  misc_feature (1)..( 12): Result.005 file - promoters50/4768599
tttgataccagt

SEQ ID NO: 189885 - DNA, 12 bp, Unknown
  misc_feature (1)..( 12): Result.005 file - promoters50/4768599
tttgattgtgtc

SEQ ID NO: 189886 - DNA, 12 bp, Unknown
  misc_feature (1)..( 12): Result.005 file - promoters50/4768599
tttgattttcat

SEQ ID NO: 189887 - DNA, 12 bp, Unknown
  misc_feature (1)..( 12): Result.005 file - promoters50/4768599
tttaatttccat

SEQ ID NO: 189888 - DNA, 11 bp, Unknown
  misc_feature (1)..( 11): Result.005 file - promoters50/4768615
ttaacaaaaaa

SEQ ID NO: 189889 - DNA, 11 bp, Unknown
  misc_feature (1)..( 11): Result.005 file - promoters50/4768615
tatacaaaaaa

SEQ ID NO: 189890 - DNA, 11 bp, Unknown
  misc_feature (1)..( 11): Result.005 file - promoters50/4768615
attacaaaact

SEQ ID NO: 189891 - DNA, 11 bp, Unknown
  misc_feature (1)..( 11): Result.005 file - promoters50/4768615
ctcccaaaaat

SEQ ID NO: 189892 - DNA, 11 bp, Unknown
  misc_feature (1)..( 11): Result.005 file - promoters50/4768615
ctaataaagta

SEQ ID NO: 189893 - DNA, 11 bp, Unknown
  misc_feature (1)..( 11): Result.005 file - promoters50/4768615
ttcctaaaatc

SEQ ID NO: 189894 - DNA, 11 bp, Unknown
  misc_feature (1)..( 11): Result.005 file - promoters50/4768615
atttcaaaatt

SEQ ID NO: 189895 - DNA, 12 bp, Unknown
  misc_feature (1)..( 12): Result.005 file - promoters50/4768615
caaaaaacttta

SEQ ID NO: 189896 - DNA, 12 bp, Unknown
  misc_feature (1)..( 12): Result.005 file - promoters50/4768615
caataaaattaa

SEQ ID NO: 189897 - DNA, 12 bp, Unknown
  misc_feature (1)..( 12): Result.005 file - promoters50/4768615
caaaaacagtaa

SEQ ID NO: 189898 - DNA, 12 bp, Unknown
  misc_feature (1)..( 12): Result.005 file - promoters50/4768615
caaaaattatta

SEQ ID NO: 189899 - DNA, 12 bp, Unknown
  misc_feature (1)..( 12): Result.005 file - promoters50/4768615
agataatatttc

SEQ ID NO: 189900 - DNA, 12 bp, Unknown
  misc_feature (1)..( 12): Result.005 file - promoters50/4768615
aaataaataaaa

SEQ ID NO: 189901 - DNA, 12 bp, Unknown
  misc_feature (1)..( 12): Result.005 file - promoters50/4768615
taattaaattaa

SEQ ID NO: 189902 - DNA, 12 bp, Unknown
  misc_feature (1)..( 12): Result.005 file - promoters50/4768615
taaaaatctcga

SEQ ID NO: 189903 - DNA, 14 bp, Unknown
  misc_feature (1)..( 14): Result.005 file - promoters50/4768615
aactttattataga

SEQ ID NO: 189904 - DNA, 14 bp, Unknown
  misc_feature (1)..( 14): Result.005 file - promoters50/4768615
aaaattaatattta

SEQ ID NO: 189905 - DNA, 14 bp, Unknown
  misc_feature (1)..( 14): Result.005 file - promoters50/4768615
tcttttattttatt

SEQ ID NO: 189906 - DNA, 14 bp, Unknown
  misc_feature (1)..( 14): Result.005 file - promoters50/4768615
ggagataatatttc

SEQ ID NO: 189907 - DNA, 14 bp, Unknown
  misc_feature (1)..( 14): Result.005 file - promoters50/4768615
aaaataaataaaag

SEQ ID NO: 189908 - DNA, 14 bp, Unknown
  misc_feature (1)..( 14): Result.005 file - promoters50/4768615
catattaataaagc

SEQ ID NO: 189909 - DNA, 14 bp, Unknown
  misc_feature (1)..( 14): Result.005 file - promoters50/4768615
aatattaataatta

SEQ ID NO: 189910 - DNA, 14 bp, Unknown
  misc_feature (1)..( 14): Result.005 file - promoters50/4768615
cgatgaaatataag

SEQ ID NO: 189911 - DNA, 13 bp, Unknown
  misc_feature (1)..( 13): Result.005 file - promoters50/4768615
aatttaactaatt

SEQ ID NO: 189912 - DNA, 13 bp, Unknown
  misc_feature (1)..( 13): Result.005 file - promoters50/4768615
tctataaataaat

SEQ ID NO: 189913 - DNA, 13 bp, Unknown
  misc_feature (1)..( 13): Result.005 file - promoters50/4768615
aatataactcttg

SEQ ID NO: 189914 - DNA, 13 bp, Unknown
  misc_feature (1)..( 13): Result.005 file - promoters50/4768615
agtcaaacaaatg

SEQ ID NO: 189915 - DNA, 13 bp, Unknown
  misc_feature (1)..( 13): Result.005 file - promoters50/4768615
tgaaaaacaaacg

SEQ ID NO: 189916 - DNA, 13 bp, Unknown
  misc_feature (1)..( 13): Result.005 file - promoters50/4768615
agtataatgaatt

SEQ ID NO: 189917 - DNA, 13 bp, Unknown
  misc_feature (1)..( 13): Result.005 file - promoters50/4768615
agtcaatcaaatt

SEQ ID NO: 189918 - DNA, 13 bp, Unknown
  misc_feature (1)..( 13): Result.005 file - promoters50/4768615
gggaaaaaaaaga

SEQ ID NO: 189919 - DNA, 12 bp, Unknown
  misc_feature (1)..( 12): Result.005 file - promoters50/4768615
ttacaaaatatc

SEQ ID NO: 189920 - DNA, 12 bp, Unknown
  misc_feature (1)..( 12): Result.005 file - promoters50/4768615
ctttaaactatg

SEQ ID NO: 189921 - DNA, 12 bp, Unknown
  misc_feature (1)..( 12): Result.005 file - promoters50/4768615
aaaaaaaataag

SEQ ID NO: 189922 - DNA, 12 bp, Unknown
  misc_feature (1)..( 12): Result.005 file - promoters50/4768615
acaaaaacaata

SEQ ID NO: 189923 - DNA, 12 bp, Unknown
  misc_feature (1)..( 12): Result.005 file - promoters50/4768615
ccaaagacaagt

SEQ ID NO: 189924 - DNA, 12 bp, Unknown
  misc_feature (1)..( 12): Result.005 file - promoters50/4768615
tttttaaataca

SEQ ID NO: 189925 - DNA, 12 bp, Unknown
  misc_feature (1)..( 12): Result.005 file - promoters50/4768615
agatagataaga

SEQ ID NO: 189926 - DNA, 11 bp, Unknown
  misc_feature (1)..( 11): Result.005 file - promoters50/4768615
gggttacaaaa

SEQ ID NO: 189927 - DNA, 11 bp, Unknown
  misc_feature (1)..( 11): Result.005 file - promoters50/4768615
aagagacaaaa

SEQ ID NO: 189928 - DNA, 11 bp, Unknown
  misc_feature (1)..( 11): Result.005 file - promoters50/4768615
gtttaacaaaa

SEQ ID NO: 189929 - DNA, 11 bp, Unknown
  misc_feature (1)..( 11): Result.005 file - promoters50/4768615
caaagacaagt

SEQ ID NO: 189930 - DNA, 11 bp, Unknown
  misc_feature (1)..( 11): Result.005 file - promoters50/4768615
gatagataaga

SEQ ID NO: 189931 - DNA, 11 bp, Unknown
  misc_feature (1)..( 11): Result.005 file - promoters50/4768615
gcctaataaaa

SEQ ID NO: 189932 - DNA, 11 bp, Unknown
  misc_feature (1)..( 11): Result.005 file - promoters50/4768615
catcaataaat

SEQ ID NO: 189933 - DNA, 14 bp, Unknown
  misc_feature (1)..( 14): Result.005 file - promoters50/4768615
aacaacaaaaaaag

SEQ ID NO: 189934 - DNA, 14 bp, Unknown
  misc_feature (1)..( 14): Result.005 file - promoters50/4768615
aagtacaaaacgaa

SEQ ID NO: 189935 - DNA, 14 bp, Unknown
  misc_feature (1)..( 14): Result.005 file - promoters50/4768615
aacgacaaaacaag

SEQ ID NO: 189936 - DNA, 14 bp, Unknown
  misc_feature (1)..( 14): Result.005 file - promoters50/4768615
atcaacaaaaattg

SEQ ID NO: 189937 - DNA, 14 bp, Unknown
  misc_feature (1)..( 14): Result.005 file - promoters50/4768615
ataaaccaatgttt

SEQ ID NO: 189938 - DNA, 14 bp, Unknown
  misc_feature (1)..( 14): Result.005 file - promoters50/4768615
accgttaaaaatct

SEQ ID NO: 189939 - DNA, 14 bp, Unknown
  misc_feature (1)..( 14): Result.005 file - promoters50/4768615
aaaatcaagaatac

SEQ ID NO: 189940 - DNA, 15 bp, Unknown
  misc_feature (1)..( 15): Result.005 file - promoters50/4768615
aaaaagaaatcgaag

SEQ ID NO: 189941 - DNA, 15 bp, Unknown
  misc_feature (1)..( 15): Result.005 file - promoters50/4768615
aaaacgaaaacaatc

SEQ ID NO: 189942 - DNA, 16 bp, Unknown
  misc_feature (1)..( 16): Result.005 file - promoters50/4768615
cgaacgacaaaacaag

SEQ ID NO: 189943 - DNA, 16 bp, Unknown
  misc_feature (1)..( 16): Result.005 file - promoters50/4768615
taaaccaatgtttatt

SEQ ID NO: 189944 - DNA, 16 bp, Unknown
  misc_feature (1)..( 16): Result.005 file - promoters50/4768615
tcaacaaaaattgaaa

SEQ ID NO: 189945 - DNA, 16 bp, Unknown
  misc_feature (1)..( 16): Result.005 file - promoters50/4768615
aaaaatctcgtgtgca

SEQ ID NO: 189946 - DNA, 16 bp, Unknown
  misc_feature (1)..( 16): Result.005 file - promoters50/4768615
atcaagaatacatttc

SEQ ID NO: 189947 - DNA, 8 bp, Unknown
  misc_feature (1)..( 8): Result.005 file - promoters50/4768615
tataaact

SEQ ID NO: 189948 - DNA, 8 bp, Unknown
  misc_feature (1)..( 8): Result.005 file - promoters50/4768615
tatatact

SEQ ID NO: 189949 - DNA, 8 bp, Unknown
  misc_feature (1)..( 8): Result.005 file - promoters50/4768615
tataaatt

SEQ ID NO: 189950 - DNA, 8 bp, Unknown
  misc_feature (1)..( 8): Result.005 file - promoters50/4768615
tataaacc

SEQ ID NO: 189951 - DNA, 8 bp, Unknown
  misc_feature (1)..( 8): Result.005 file - promoters50/4768615
tataaaca

SEQ ID NO: 189952 - DNA, 8 bp, Unknown
  misc_feature (1)..( 8): Result.005 file - promoters50/4768615
tatatata

SEQ ID NO: 189953 - DNA, 8 bp, Unknown
  misc_feature (1)..( 8): Result.005 file - promoters50/4768615
tatatata

SEQ ID NO: 189954 - DNA, 12 bp, Unknown
  misc_feature (1)..( 12): Result.005 file - promoters50/4768615
cagttatttaaa

SEQ ID NO: 189955 - DNA, 12 bp, Unknown
  misc_feature (1)..( 12): Result.005 file - promoters50/4768615
ttgttattatat

SEQ ID NO: 189956 - DNA, 12 bp, Unknown
  misc_feature (1)..( 12): Result.005 file - promoters50/4768615
atattattagcc

SEQ ID NO: 189957 - DNA, 12 bp, Unknown
  misc_feature (1)..( 12): Result.005 file - promoters50/4768615
atattattagta

SEQ ID NO: 189958 - DNA, 12 bp, Unknown
  misc_feature (1)..( 12): Result.005 file - promoters50/4768615
tagttaatatat

SEQ ID NO: 189959 - DNA, 12 bp, Unknown
  misc_feature (1)..( 12): Result.005 file - promoters50/4768615
aagtcaatcaaa

SEQ ID NO: 189960 - DNA, 10 bp, Unknown
  misc_feature (1)..( 10): Result.005 file - promoters50/4768615
cctttataaa

SEQ ID NO: 189961 - DNA, 10 bp, Unknown
  misc_feature (1)..( 10): Result.005 file - promoters50/4768615
cctatatata

SEQ ID NO: 189962 - DNA, 10 bp, Unknown
  misc_feature (1)..( 10): Result.005 file - promoters50/4768615
cctctatata

SEQ ID NO: 189963 - DNA, 10 bp, Unknown
  misc_feature (1)..( 10): Result.005 file - promoters50/4768615
cctatatata

SEQ ID NO: 189964 - DNA, 10 bp, Unknown
  misc_feature (1)..( 10): Result.005 file - promoters50/4768615
tatatatact

SEQ ID NO: 189965 - DNA, 10 bp, Unknown
  misc_feature (1)..( 10): Result.005 file - promoters50/4768615
attatatata

SEQ ID NO: 189966 - DNA, 10 bp, Unknown
  misc_feature (1)..( 10): Result.005 file - promoters50/4768615
cctataaatt

SEQ ID NO: 189967 - DNA, 14 bp, Unknown
  misc_feature (1)..( 14): Result.005 file - promoters50/4768615
aacaacaaaaaaag

SEQ ID NO: 189968 - DNA, 14 bp, Unknown
  misc_feature (1)..( 14): Result.005 file - promoters50/4768615
cacaacattgcttc

SEQ ID NO: 189969 - DNA, 14 bp, Unknown
  misc_feature (1)..( 14): Result.005 file - promoters50/4768615
aacgacaaaacaag

SEQ ID NO: 189970 - DNA, 14 bp, Unknown
  misc_feature (1)..( 14): Result.005 file - promoters50/4768615
atcaacaaaaattg

SEQ ID NO: 189971 - DNA, 14 bp, Unknown
  misc_feature (1)..( 14): Result.005 file - promoters50/4768615
taaaccaatgttta

SEQ ID NO: 189972 - DNA, 14 bp, Unknown
  misc_feature (1)..( 14): Result.005 file - promoters50/4768615
aacgaaaacaatca

SEQ ID NO: 189973 - DNA, 14 bp, Unknown
  misc_feature (1)..( 14): Result.005 file - promoters50/4768615
gttaaaaatctcgt

SEQ ID NO: 189974 - DNA, 14 bp, Unknown
  misc_feature (1)..( 14): Result.005 file - promoters50/4768615
tccaaaattaaaat

SEQ ID NO: 189975 - DNA, 10 bp, Unknown
  misc_feature (1)..( 10): Result.005 file - promoters50/4768615
taaaaattaa

SEQ ID NO: 189976 - DNA, 10 bp, Unknown
  misc_feature (1)..( 10): Result.005 file - promoters50/4768615
taaaaatctc

SEQ ID NO: 189977 - DNA, 10 bp, Unknown
  misc_feature (1)..( 10): Result.005 file - promoters50/4768615
gtaaaatttc

SEQ ID NO: 189978 - DNA, 10 bp, Unknown
  misc_feature (1)..( 10): Result.005 file - promoters50/4768615
aaaatattaa

SEQ ID NO: 189979 - DNA, 10 bp, Unknown
  misc_feature (1)..( 10): Result.005 file - promoters50/4768615
caaaaattat

SEQ ID NO: 189980 - DNA, 10 bp, Unknown
  misc_feature (1)..( 10): Result.005 file - promoters50/4768615
caaagattac

SEQ ID NO: 189981 - DNA, 10 bp, Unknown
  misc_feature (1)..( 10): Result.005 file - promoters50/4768615
ataagattag

SEQ ID NO: 189982 - DNA, 11 bp, Unknown
  misc_feature (1)..( 11): Result.005 file - promoters50/4768615
aatgctagaag

SEQ ID NO: 189983 - DNA, 11 bp, Unknown
  misc_feature (1)..( 11): Result.005 file - promoters50/4768615
aatactaaaaa

SEQ ID NO: 189984 - DNA, 11 bp, Unknown
  misc_feature (1)..( 11): Result.005 file - promoters50/4768615
aatattaacct

SEQ ID NO: 189985 - DNA, 11 bp, Unknown
  misc_feature (1)..( 11): Result.005 file - promoters50/4768615
aatactatcta

SEQ ID NO: 189986 - DNA, 11 bp, Unknown
  misc_feature (1)..( 11): Result.005 file - promoters50/4768615
aagattacata

SEQ ID NO: 189987 - DNA, 11 bp, Unknown
  misc_feature (1)..( 11): Result.005 file - promoters50/4768615
aaaatttcata

SEQ ID NO: 189988 - DNA, 13 bp, Unknown
  misc_feature (1)..( 13): Result.005 file - promoters50/4768615
tgagttaaaaaat

SEQ ID NO: 189989 - DNA, 13 bp, Unknown
  misc_feature (1)..( 13): Result.005 file - promoters50/4768615
ctagttaatatat

SEQ ID NO: 189990 - DNA, 13 bp, Unknown
  misc_feature (1)..( 13): Result.005 file - promoters50/4768615
tgaattaagacct

SEQ ID NO: 189991 - DNA, 13 bp, Unknown
  misc_feature (1)..( 13): Result.005 file - promoters50/4768615
tttgttattatat

SEQ ID NO: 189992 - DNA, 13 bp, Unknown
  misc_feature (1)..( 13): Result.005 file - promoters50/4768615
aaagtcaatcaaa

SEQ ID NO: 189993 - DNA, 13 bp, Unknown
  misc_feature (1)..( 13): Result.005 file - promoters50/4768615
cgtcatattatta

SEQ ID NO: 189994 - DNA, 7 bp, Unknown
  misc_feature (1)..( 7): Result.005 file - promoters50/4768623
cttaata

SEQ ID NO: 189995 - DNA, 7 bp, Unknown
  misc_feature (1)..( 7): Result.005 file - promoters50/4768623
gttaata

SEQ ID NO: 189996 - DNA, 7 bp, Unknown
  misc_feature (1)..( 7): Result.005 file - promoters50/4768623
cttaatc

SEQ ID NO: 189997 - DNA, 8 bp, Unknown
  misc_feature (1)..( 8): Result.005 file - promoters50/4768623
attactga

SEQ ID NO: 189998 - DNA, 8 bp, Unknown
  misc_feature (1)..( 8): Result.005 file - promoters50/4768623
attattga

SEQ ID NO: 189999 - DNA, 8 bp, Unknown
  misc_feature (1)..( 8): Result.005 file - promoters50/4768623
attattta

SEQ ID NO: 190000 - DNA, 11 bp, Unknown
  misc_feature (1)..( 11): Result.005 file - promoters50/4768631
tgataatttga

SEQ ID NO: 190001 - DNA, 11 bp, Unknown
  misc_feature (1)..( 11): Result.005 file - promoters50/4768631
tcataatttcg

SEQ ID NO: 190002 - DNA, 11 bp, Unknown
  misc_feature (1)..( 11): Result.005 file - promoters50/4768631
tgataatccat

SEQ ID NO: 190003 - DNA, 11 bp, Unknown
  misc_feature (1)..( 11): Result.005 file - promoters50/4768631
accaaatctcg

SEQ ID NO: 190004 - DNA, 11 bp, Unknown
  misc_feature (1)..( 11): Result.005 file - promoters50/4768631
tgtaaatctca

SEQ ID NO: 190005 - DNA, 11 bp, Unknown
  misc_feature (1)..( 11): Result.005 file - promoters50/4768635
ttccatgtttt

SEQ ID NO: 190006 - DNA, 11 bp, Unknown
  misc_feature (1)..( 11): Result.005 file - promoters50/4768635
cttaatgtttg

SEQ ID NO: 190007 - DNA, 11 bp, Unknown
  misc_feature (1)..( 11): Result.005 file - promoters50/4768635
tttgatgattg

SEQ ID NO: 190008 - DNA, 9 bp, Unknown
  misc_feature (1)..( 9): Result.005 file - promoters50/4768635
taaagttat

SEQ ID NO: 190009 - DNA, 11 bp, Unknown
  misc_feature (1)..( 11): Result.005 file - promoters50/4768635
tttgatgatta

SEQ ID NO: 190010 - DNA, 11 bp, Unknown
  misc_feature (1)..( 11): Result.005 file - promoters50/4768635
aatgattattc

SEQ ID NO: 190011 - DNA, 10 bp, Unknown
  misc_feature (1)..( 10): Result.005 file - promoters50/4768635
tttgctgatg

SEQ ID NO: 190012 - DNA, 10 bp, Unknown
  misc_feature (1)..( 10): Result.005 file - promoters50/4768635
tttgcttctt

SEQ ID NO: 190013 - DNA, 10 bp, Unknown
  misc_feature (1)..( 10): Result.005 file - promoters50/4768635
tttgatgatt

SEQ ID NO: 190014 - DNA, 10 bp, Unknown
  misc_feature (1)..( 10): Result.005 file - promoters50/4768635
ttttcttcac

SEQ ID NO: 190015 - DNA, 10 bp, Unknown
  misc_feature (1)..( 10): Result.005 file - promoters50/4768635
tttgatgatt

SEQ ID NO: 190016 - DNA, 10 bp, Unknown
  misc_feature (1)..( 10): Result.005 file - promoters50/4768635
aatgattatt

SEQ ID NO: 190017 - DNA, 16 bp, Unknown
  misc_feature (1)..( 16): Result.005 file - promoters50/4768635
atttttacttttaaca

SEQ ID NO: 190018 - DNA, 16 bp, Unknown
  misc_feature (1)..( 16): Result.005 file - promoters50/4768635
gttgttacttttatta

SEQ ID NO: 190019 - DNA, 16 bp, Unknown
  misc_feature (1)..( 16): Result.005 file - promoters50/4768635
ttgtttaattttaaaa

SEQ ID NO: 190020 - DNA, 16 bp, Unknown
  misc_feature (1)..( 16): Result.005 file - promoters50/4768635
taataggtttttattt

SEQ ID NO: 190021 - DNA, 16 bp, Unknown
  misc_feature (1)..( 16): Result.005 file - promoters50/4768635
ttggttaattctaact

SEQ ID NO: 190022 - DNA, 16 bp, Unknown
  misc_feature (1)..( 16): Result.005 file - promoters50/4768635
gctacttgttcaaact

SEQ ID NO: 190023 - DNA, 7 bp, Unknown
  misc_feature (1)..( 7): Result.005 file - promoters50/4768635
attctta

SEQ ID NO: 190024 - DNA, 7 bp, Unknown
  misc_feature (1)..( 7): Result.005 file - promoters50/4768635
attttta

SEQ ID NO: 190025 - DNA, 7 bp, Unknown
  misc_feature (1)..( 7): Result.005 file - promoters50/4768635
atttttg

SEQ ID NO: 190026 - DNA, 7 bp, Unknown
  misc_feature (1)..( 7): Result.005 file - promoters50/4768635
tttttta

SEQ ID NO: 190027 - DNA, 7 bp, Unknown
  misc_feature (1)..( 7): Result.005 file - promoters50/4768635
gtttttg

SEQ ID NO: 190028 - DNA, 7 bp, Unknown
  misc_feature (1)..( 7): Result.005 file - promoters50/4768635
cttttta

SEQ ID NO: 190029 - DNA, 10 bp, Unknown
  misc_feature (1)..( 10): Result.005 file - promoters50/4768635
acataaattt

SEQ ID NO: 190030 - DNA, 10 bp, Unknown
  misc_feature (1)..( 10): Result.005 file - promoters50/4768635
atatatattc

SEQ ID NO: 190031 - DNA, 11 bp, Unknown
  misc_feature (1)..( 11): Result.005 file - promoters50/4768635
gttcaaacttt

SEQ ID NO: 190032 - DNA, 11 bp, Unknown
  misc_feature (1)..( 11): Result.005 file - promoters50/4768635
gaataaatccg

SEQ ID NO: 190033 - DNA, 11 bp, Unknown
  misc_feature (1)..( 11): Result.005 file - promoters50/4768635
accaaaactta

SEQ ID NO: 190034 - DNA, 11 bp, Unknown
  misc_feature (1)..( 11): Result.005 file - promoters50/4768635
ttctaactcaa

SEQ ID NO: 190035 - DNA, 9 bp, Unknown
  misc_feature (1)..( 9): Result.005 file - promoters50/4768663
gaataacaa

SEQ ID NO: 190036 - DNA, 9 bp, Unknown
  misc_feature (1)..( 9): Result.005 file - promoters50/4768663
caataacca

SEQ ID NO: 190037 - DNA, 9 bp, Unknown
  misc_feature (1)..( 9): Result.005 file - promoters50/4768663
aaattacaa

SEQ ID NO: 190038 - DNA, 9 bp, Unknown
  misc_feature (1)..( 9): Result.005 file - promoters50/4768663
gaaaaaccc

SEQ ID NO: 190039 - DNA, 9 bp, Unknown
  misc_feature (1)..( 9): Result.005 file - promoters50/4768663
aaattatta

SEQ ID NO: 190040 - DNA, 9 bp, Unknown
  misc_feature (1)..( 9): Result.005 file - promoters50/4768663
aaattatat

SEQ ID NO: 190041 - DNA, 9 bp, Unknown
  misc_feature (1)..( 9): Result.005 file - promoters50/4768663
aaattactc

SEQ ID NO: 190042 - DNA, 17 bp, Unknown
  misc_feature (1)..( 17): Result.005 file - promoters50/4768663
gtcgctgatttacaaaa

SEQ ID NO: 190043 - DNA, 17 bp, Unknown
  misc_feature (1)..( 17): Result.005 file - promoters50/4768663
aacaaatatttaaaaaa

SEQ ID NO: 190044 - DNA, 17 bp, Unknown
  misc_feature (1)..( 17): Result.005 file - promoters50/4768663
attacagatttacatat

SEQ ID NO: 190045 - DNA, 17 bp, Unknown
  misc_feature (1)..( 17): Result.005 file - promoters50/4768663
tgttcaaattttcaagt

SEQ ID NO: 190046 - DNA, 17 bp, Unknown
  misc_feature (1)..( 17): Result.005 file - promoters50/4768663
ttttttggtttgaaata

SEQ ID NO: 190047 - DNA, 17 bp, Unknown
  misc_feature (1)..( 17): Result.005 file - promoters50/4768663
aaccaatacttaaattc

SEQ ID NO: 190048 - DNA, 7 bp, Unknown
  misc_feature (1)..( 7): Result.005 file - promoters50/4768678
caaattg

SEQ ID NO: 190049 - DNA, 7 bp, Unknown
  misc_feature (1)..( 7): Result.005 file - promoters50/4768678
caaattc

SEQ ID NO: 190050 - DNA, 7 bp, Unknown
  misc_feature (1)..( 7): Result.005 file - promoters50/4768678
caatttc

SEQ ID NO: 190051 - DNA, 15 bp, Unknown
  misc_feature (1)..( 15): Result.005 file - promoters50/4768698
ataactttatgttat

SEQ ID NO: 190052 - DNA, 15 bp, Unknown
  misc_feature (1)..( 15): Result.005 file - promoters50/4768698
gtaacttcaggctaa

SEQ ID NO: 190053 - DNA, 15 bp, Unknown
  misc_feature (1)..( 15): Result.005 file - promoters50/4768698
atatctttataagta

SEQ ID NO: 190054 - DNA, 15 bp, Unknown
  misc_feature (1)..( 15): Result.005 file - promoters50/4768698
ataactttatgttat

SEQ ID NO: 190055 - DNA, 15 bp, Unknown
  misc_feature (1)..( 15): Result.005 file - promoters50/4768698
tacgttttaaaagta

SEQ ID NO: 190056 - DNA, 15 bp, Unknown
  misc_feature (1)..( 15): Result.005 file - promoters50/4768698
ctcgcttcataacaa

SEQ ID NO: 190057 - DNA, 15 bp, Unknown
  misc_feature (1)..( 15): Result.005 file - promoters50/4768698
gattagaaaaaagtc

SEQ ID NO: 190058 - DNA, 16 bp, Unknown
  misc_feature (1)..( 16): Result.005 file - promoters50/4768698
attgtgaaataatttt

SEQ ID NO: 190059 - DNA, 16 bp, Unknown
  misc_feature (1)..( 16): Result.005 file - promoters50/4768698
attttgaaataatttc

SEQ ID NO: 190060 - DNA, 17 bp, Unknown
  misc_feature (1)..( 17): Result.005 file - promoters50/4768698
attctaaaatattgttc

SEQ ID NO: 190061 - DNA, 17 bp, Unknown
  misc_feature (1)..( 17): Result.005 file - promoters50/4768698
gattttcataaatttta

SEQ ID NO: 190062 - DNA, 17 bp, Unknown
  misc_feature (1)..( 17): Result.005 file - promoters50/4768698
tctgagaaatagatttg

SEQ ID NO: 190063 - DNA, 17 bp, Unknown
  misc_feature (1)..( 17): Result.005 file - promoters50/4768698
attgtgaaataattttg

SEQ ID NO: 190064 - DNA, 17 bp, Unknown
  misc_feature (1)..( 17): Result.005 file - promoters50/4768698
tttccataaaaatgtta

SEQ ID NO: 190065 - DNA, 11 bp, Unknown
  misc_feature (1)..( 11): Result.005 file - promoters50/4768698
tgttattagtt

SEQ ID NO: 190066 - DNA, 11 bp, Unknown
  misc_feature (1)..( 11): Result.005 file - promoters50/4768698
atgcattagtt

SEQ ID NO: 190067 - DNA, 11 bp, Unknown
  misc_feature (1)..( 11): Result.005 file - promoters50/4768698
ctttataagta

SEQ ID NO: 190068 - DNA, 11 bp, Unknown
  misc_feature (1)..( 11): Result.005 file - promoters50/4768698
ctaaatttgtt

SEQ ID NO: 190069 - DNA, 11 bp, Unknown
  misc_feature (1)..( 11): Result.005 file - promoters50/4768698
ataattttgtt

SEQ ID NO: 190070 - DNA, 11 bp, Unknown
  misc_feature (1)..( 11): Result.005 file - promoters50/4768698
ttttaaaagta

SEQ ID NO: 190071 - DNA, 11 bp, Unknown
  misc_feature (1)..( 11): Result.005 file - promoters50/4768698
cttcataacaa

SEQ ID NO: 190072 - DNA, 11 bp, Unknown
  misc_feature (1)..( 11): Result.005 file - promoters50/4768698
agaaaaaagtc

SEQ ID NO: 190073 - DNA, 13 bp, Unknown
  misc_feature (1)..( 13): Result.005 file - promoters50/4768698
atttgaaaatttc

SEQ ID NO: 190074 - DNA, 13 bp, Unknown
  misc_feature (1)..( 13): Result.005 file - promoters50/4768698
aacagaaaattcg

SEQ ID NO: 190075 - DNA, 13 bp, Unknown
  misc_feature (1)..( 13): Result.005 file - promoters50/4768698
tatttgaaatttt

SEQ ID NO: 190076 - DNA, 13 bp, Unknown
  misc_feature (1)..( 13): Result.005 file - promoters50/4768698
gcgctaaactttt

SEQ ID NO: 190077 - DNA, 13 bp, Unknown
  misc_feature (1)..( 13): Result.005 file - promoters50/4768698
ggccgaaaatata

SEQ ID NO: 190078 - DNA, 13 bp, Unknown
  misc_feature (1)..( 13): Result.005 file - promoters50/4768698
tggccggaatttt

SEQ ID NO: 190079 - DNA, 13 bp, Unknown
  misc_feature (1)..( 13): Result.005 file - promoters50/4768698
ggccgaaaaaaga

SEQ ID NO: 190080 - DNA, 10 bp, Unknown
  misc_feature (1)..( 10): Result.005 file - promoters50/4768698
gtatataaat

SEQ ID NO: 190081 - DNA, 10 bp, Unknown
  misc_feature (1)..( 10): Result.005 file - promoters50/4768698
ttatataaac

SEQ ID NO: 190082 - DNA, 10 bp, Unknown
  misc_feature (1)..( 10): Result.005 file - promoters50/4768698
acctataaat

SEQ ID NO: 190083 - DNA, 10 bp, Unknown
  misc_feature (1)..( 10): Result.005 file - promoters50/4768698
atatataata

SEQ ID NO: 190084 - DNA, 10 bp, Unknown
  misc_feature (1)..( 10): Result.005 file - promoters50/4768698
gtatataaac

SEQ ID NO: 190085 - DNA, 10 bp, Unknown
  misc_feature (1)..( 10): Result.005 file - promoters50/4768698
gtatataaat

SEQ ID NO: 190086 - DNA, 14 bp, Unknown
  misc_feature (1)..( 14): Result.005 file - promoters50/4768698
gatttgctgaataa

SEQ ID NO: 190087 - DNA, 14 bp, Unknown
  misc_feature (1)..( 14): Result.005 file - promoters50/4768698
attttgatgaatgt

SEQ ID NO: 190088 - DNA, 14 bp, Unknown
  misc_feature (1)..( 14): Result.005 file - promoters50/4768698
gtgatgaagaagga

SEQ ID NO: 190089 - DNA, 14 bp, Unknown
  misc_feature (1)..( 14): Result.005 file - promoters50/4768698
tttttgaagaattt

SEQ ID NO: 190090 - DNA, 14 bp, Unknown
  misc_feature (1)..( 14): Result.005 file - promoters50/4768698
tttttgggtcaatt

SEQ ID NO: 190091 - DNA, 14 bp, Unknown
  misc_feature (1)..( 14): Result.005 file - promoters50/4768698
ctttcgatgtataa

SEQ ID NO: 190092 - DNA, 14 bp, Unknown
  misc_feature (1)..( 14): Result.005 file - promoters50/4768698
tcccttgtgaatgt

SEQ ID NO: 190093 - DNA, 15 bp, Unknown
  misc_feature (1)..( 15): Result.005 file - promoters50/4768698
tgttagataggaaaa

SEQ ID NO: 190094 - DNA, 15 bp, Unknown
  misc_feature (1)..( 15): Result.005 file - promoters50/4768698
tgttaaatatgaata

SEQ ID NO: 190095 - DNA, 15 bp, Unknown
  misc_feature (1)..( 15): Result.005 file - promoters50/4768698
tcataaattttaaaa

SEQ ID NO: 190096 - DNA, 15 bp, Unknown
  misc_feature (1)..( 15): Result.005 file - promoters50/4768698
tctaaaatattgttc

SEQ ID NO: 190097 - DNA, 15 bp, Unknown
  misc_feature (1)..( 15): Result.005 file - promoters50/4768698
tgtttaatggagttt

SEQ ID NO: 190098 - DNA, 15 bp, Unknown
  misc_feature (1)..( 15): Result.005 file - promoters50/4768698
aaatagatttgaaaa

SEQ ID NO: 190099 - DNA, 10 bp, Unknown
  misc_feature (1)..( 10): Result.005 file - promoters50/4768708
ggtgtttttg

SEQ ID NO: 190100 - DNA, 10 bp, Unknown
  misc_feature (1)..( 10): Result.005 file - promoters50/4768708
taagttgttg

SEQ ID NO: 190101 - DNA, 10 bp, Unknown
  misc_feature (1)..( 10): Result.005 file - promoters50/4768708
taaattgtct

SEQ ID NO: 190102 - DNA, 8 bp, Unknown
  misc_feature (1)..( 8): Result.005 file - promoters50/4768708
tttgagac

SEQ ID NO: 190103 - DNA, 8 bp, Unknown
  misc_feature (1)..( 8): Result.005 file - promoters50/4768708
tttaagat

SEQ ID NO: 190104 - DNA, 8 bp, Unknown
  misc_feature (1)..( 8): Result.005 file - promoters50/4768708
tataagat

SEQ ID NO: 190105 - DNA, 10 bp, Unknown
  misc_feature (1)..( 10): Result.005 file - promoters50/4768708
gaagcaaaac

SEQ ID NO: 190106 - DNA, 10 bp, Unknown
  misc_feature (1)..( 10): Result.005 file - promoters50/4768708
aaagaaaaac

SEQ ID NO: 190107 - DNA, 10 bp, Unknown
  misc_feature (1)..( 10): Result.005 file - promoters50/4768708
gaagaaaaaa

SEQ ID NO: 190108 - DNA, 6 bp, Unknown
  misc_feature (1)..( 6): Result.005 file - promoters50/4768708
tttttt

SEQ ID NO: 190109 - DNA, 6 bp, Unknown
  misc_feature (1)..( 6): Result.005 file - promoters50/4768708
tttttt

SEQ ID NO: 190110 - DNA, 6 bp, Unknown
  misc_feature (1)..( 6): Result.005 file - promoters50/4768708
tttttt

SEQ ID NO: 190111 - DNA, 8 bp, Unknown
  misc_feature (1)..( 8): Result.005 file - promoters50/4768708
tcagtaaa

SEQ ID NO: 190112 - DNA, 8 bp, Unknown
  misc_feature (1)..( 8): Result.005 file - promoters50/4768708
aaagtaaa

SEQ ID NO: 190113 - DNA, 8 bp, Unknown
  misc_feature (1)..( 8): Result.005 file - promoters50/4768708
aaagaaaa

SEQ ID NO: 190114 - DNA, 8 bp, Unknown
  misc_feature (1)..( 8): Result.005 file - promoters50/4768754
aaaaaaat

SEQ ID NO: 190115 - DNA, 8 bp, Unknown
  misc_feature (1)..( 8): Result.005 file - promoters50/4768754
aaaacaat

SEQ ID NO: 190116 - DNA, 8 bp, Unknown
  misc_feature (1)..( 8): Result.005 file - promoters50/4768754
caaacatc

SEQ ID NO: 190117 - DNA, 10 bp, Unknown
  misc_feature (1)..( 10): Result.005 file - promoters50/4768754
tattttctat

SEQ ID NO: 190118 - DNA, 10 bp, Unknown
  misc_feature (1)..( 10): Result.005 file - promoters50/4768754
tatgttctgt

SEQ ID NO: 190119 - DNA, 10 bp, Unknown
  misc_feature (1)..( 10): Result.005 file - promoters50/4768754
catgttttgt

SEQ ID NO: 190120 - DNA, 10 bp, Unknown
  misc_feature (1)..( 10): Result.005 file - promoters50/4768762
tcattatcat

SEQ ID NO: 190121 - DNA, 10 bp, Unknown
  misc_feature (1)..( 10): Result.005 file - promoters50/4768762
tcattctcat

SEQ ID NO: 190122 - DNA, 10 bp, Unknown
  misc_feature (1)..( 10): Result.005 file - promoters50/4768762
atattctccc

SEQ ID NO: 190123 - DNA, 9 bp, Unknown
  misc_feature (1)..( 9): Result.005 file - promoters50/4768762
ttaaattga

SEQ ID NO: 190124 - DNA, 9 bp, Unknown
  misc_feature (1)..( 9): Result.005 file - promoters50/4768762
caaaaatga

SEQ ID NO: 190125 - DNA, 9 bp, Unknown
  misc_feature (1)..( 9): Result.005 file - promoters50/4768762
ttacatttg

SEQ ID NO: 190126 - DNA, 12 bp, Unknown
  misc_feature (1)..( 12): Result.005 file - promoters50/4768778
aaaaaatttatt

SEQ ID NO: 190127 - DNA, 12 bp, Unknown
  misc_feature (1)..( 12): Result.005 file - promoters50/4768778
atgagatttata

SEQ ID NO: 190128 - DNA, 12 bp, Unknown
  misc_feature (1)..( 12): Result.005 file - promoters50/4768778
agaaagtttaaa

SEQ ID NO: 190129 - DNA, 12 bp, Unknown
  misc_feature (1)..( 12): Result.005 file - promoters50/4768778
aaaaaatatata

SEQ ID NO: 190130 - DNA, 12 bp, Unknown
  misc_feature (1)..( 12): Result.005 file - promoters50/4768778
aaaacatttaaa

SEQ ID NO: 190131 - DNA, 12 bp, Unknown
  misc_feature (1)..( 12): Result.005 file - promoters50/4768778
agcgtatgtata

SEQ ID NO: 190132 - DNA, 12 bp, Unknown
  misc_feature (1)..( 12): Result.005 file - promoters50/4768782
attattctaagt

SEQ ID NO: 190133 - DNA, 12 bp, Unknown
  misc_feature (1)..( 12): Result.005 file - promoters50/4768782
cttattctttat

SEQ ID NO: 190134 - DNA, 12 bp, Unknown
  misc_feature (1)..( 12): Result.005 file - promoters50/4768782
atttttcacacg

SEQ ID NO: 190135 - DNA, 12 bp, Unknown
  misc_feature (1)..( 12): Result.005 file - promoters50/4768782
cttcttcttctt

SEQ ID NO: 190136 - DNA, 9 bp, Unknown
  misc_feature (1)..( 9): Result.005 file - promoters50/4768782
ctttgatta

SEQ ID NO: 190137 - DNA, 9 bp, Unknown
  misc_feature (1)..( 9): Result.005 file - promoters50/4768782
gtgtgatta

SEQ ID NO: 190138 - DNA, 9 bp, Unknown
  misc_feature (1)..( 9): Result.005 file - promoters50/4768782
tattgttta

SEQ ID NO: 190139 - DNA, 9 bp, Unknown
  misc_feature (1)..( 9): Result.005 file - promoters50/4768782
tattttttt

SEQ ID NO: 190140 - DNA, 12 bp, Unknown
  misc_feature (1)..( 12): Result.005 file - promoters50/4768782
atgatctattct

SEQ ID NO: 190141 - DNA, 12 bp, Unknown
  misc_feature (1)..( 12): Result.005 file - promoters50/4768782
cttgtctcttct

SEQ ID NO: 190142 - DNA, 12 bp, Unknown
  misc_feature (1)..( 12): Result.005 file - promoters50/4768782
cttctctctttt

SEQ ID NO: 190143 - DNA, 12 bp, Unknown
  misc_feature (1)..( 12): Result.005 file - promoters50/4768782
gagatcttttct

SEQ ID NO: 190144 - DNA, 14 bp, Unknown
  misc_feature (1)..( 14): Result.005 file - promoters50/4768782
tatgacaacagtca

SEQ ID NO: 190145 - DNA, 14 bp, Unknown
  misc_feature (1)..( 14): Result.005 file - promoters50/4768782
tataacagaattgc

SEQ ID NO: 190146 - DNA, 14 bp, Unknown
  misc_feature (1)..( 14): Result.005 file - promoters50/4768782
aatgactacactca

SEQ ID NO: 190147 - DNA, 14 bp, Unknown
  misc_feature (1)..( 14): Result.005 file - promoters50/4768782
tgatactacaccat

SEQ ID NO: 190148 - DNA, 9 bp, Unknown
  misc_feature (1)..( 9): Result.005 file - promoters50/4768782
ttttatata

SEQ ID NO: 190149 - DNA, 9 bp, Unknown
  misc_feature (1)..( 9): Result.005 file - promoters50/4768782
ctttttatt

SEQ ID NO: 190150 - DNA, 9 bp, Unknown
  misc_feature (1)..( 9): Result.005 file - promoters50/4768782
cttcttatt

SEQ ID NO: 190151 - DNA, 9 bp, Unknown
  misc_feature (1)..( 9): Result.005 file - promoters50/4768782
tttcttaaa

SEQ ID NO: 190152 - DNA, 7 bp, Unknown
  misc_feature (1)..( 7): Result.005 file - promoters50/4768804
ctaacaa

SEQ ID NO: 190153 - DNA, 7 bp, Unknown
  misc_feature (1)..( 7): Result.005 file - promoters50/4768804
ctaacac

SEQ ID NO: 190154 - DNA, 7 bp, Unknown
  misc_feature (1)..( 7): Result.005 file - promoters50/4768804
gtaacaa

SEQ ID NO: 190155 - DNA, 7 bp, Unknown
  misc_feature (1)..( 7): Result.005 file - promoters50/4768804
gtaacat

SEQ ID NO: 190156 - DNA, 7 bp, Unknown
  misc_feature (1)..( 7): Result.005 file - promoters50/4768804
tattata

SEQ ID NO: 190157 - DNA, 7 bp, Unknown
  misc_feature (1)..( 7): Result.005 file - promoters50/4768804
aattata

SEQ ID NO: 190158 - DNA, 7 bp, Unknown
  misc_feature (1)..( 7): Result.005 file - promoters50/4768804
aatgata

SEQ ID NO: 190159 - DNA, 9 bp, Unknown
  misc_feature (1)..( 9): Result.005 file - promoters50/4768811
ataaataag

SEQ ID NO: 190160 - DNA, 9 bp, Unknown
  misc_feature (1)..( 9): Result.005 file - promoters50/4768811
ttaattaat

SEQ ID NO: 190161 - DNA, 9 bp, Unknown
  misc_feature (1)..( 9): Result.005 file - promoters50/4768811
gtatatata

SEQ ID NO: 190162 - DNA, 9 bp, Unknown
  misc_feature (1)..( 9): Result.005 file - promoters50/4768811
gtatataac

SEQ ID NO: 190163 - DNA, 9 bp, Unknown
  misc_feature (1)..( 9): Result.005 file - promoters50/4768811
ctatatata

SEQ ID NO: 190164 - DNA, 9 bp, Unknown
  misc_feature (1)..( 9): Result.005 file - promoters50/4768811
ttatatatt

SEQ ID NO: 190165 - DNA, 10 bp, Unknown
  misc_feature (1)..( 10): Result.005 file - promoters50/4768829
taatgtctca

SEQ ID NO: 190166 - DNA, 10 bp, Unknown
  misc_feature (1)..( 10): Result.005 file - promoters50/4768829
atatgtctgc

SEQ ID NO: 190167 - DNA, 10 bp, Unknown
  misc_feature (1)..( 10): Result.005 file - promoters50/4768829
ttatttcttt

SEQ ID NO: 190168 - DNA, 10 bp, Unknown
  misc_feature (1)..( 10): Result.005 file - promoters50/4768829
ttattttgca

SEQ ID NO: 190169 - DNA, 10 bp, Unknown
  misc_feature (1)..( 10): Result.005 file - promoters50/4768829
ttaattcttt

SEQ ID NO: 190170 - DNA, 10 bp, Unknown
  misc_feature (1)..( 10): Result.005 file - promoters50/4768829
acattgattt

SEQ ID NO: 190171 - DNA, 11 bp, Unknown
  misc_feature (1)..( 11): Result.005 file - promoters50/4768829
tattttattac

SEQ ID NO: 190172 - DNA, 11 bp, Unknown
  misc_feature (1)..( 11): Result.005 file - promoters50/4768829
tatattattaa

SEQ ID NO: 190173 - DNA, 11 bp, Unknown
  misc_feature (1)..( 11): Result.005 file - promoters50/4768829
aattgtataac

SEQ ID NO: 190174 - DNA, 11 bp, Unknown
  misc_feature (1)..( 11): Result.005 file - promoters50/4768829
tcaagtattaa

SEQ ID NO: 190175 - DNA, 11 bp, Unknown
  misc_feature (1)..( 11): Result.005 file - promoters50/4768829
tatattgttta

SEQ ID NO: 190176 - DNA, 11 bp, Unknown
  misc_feature (1)..( 11): Result.005 file - promoters50/4768829
tgttgtatgtg

SEQ ID NO: 190177 - DNA, 13 bp, Unknown
  misc_feature (1)..( 13): Result.005 file - promoters50/4768829
aaacaaatgtttg

SEQ ID NO: 190178 - DNA, 13 bp, Unknown
  misc_feature (1)..( 13): Result.005 file - promoters50/4768829
aaataaatttttg

SEQ ID NO: 190179 - DNA, 13 bp, Unknown
  misc_feature (1)..( 13): Result.005 file - promoters50/4768829
aaataaatttttt

SEQ ID NO: 190180 - DNA, 13 bp, Unknown
  misc_feature (1)..( 13): Result.005 file - promoters50/4768829
aaaaaaagaagaa

SEQ ID NO: 190181 - DNA, 13 bp, Unknown
  misc_feature (1)..( 13): Result.005 file - promoters50/4768829
taactgatttttc

SEQ ID NO: 190182 - DNA, 13 bp, Unknown
  misc_feature (1)..( 13): Result.005 file - promoters50/4768829
atatgtattttta

SEQ ID NO: 190183 - DNA, 9 bp, Unknown
  misc_feature (1)..( 9): Result.005 file - promoters50/4768829
ttattatat

SEQ ID NO: 190184 - DNA, 9 bp, Unknown
  misc_feature (1)..( 9): Result.005 file - promoters50/4768829
atattatta

SEQ ID NO: 190185 - DNA, 9 bp, Unknown
  misc_feature (1)..( 9): Result.005 file - promoters50/4768829
ttattatgt

SEQ ID NO: 190186 - DNA, 9 bp, Unknown
  misc_feature (1)..( 9): Result.005 file - promoters50/4768829
gtattttta

SEQ ID NO: 190187 - DNA, 9 bp, Unknown
  misc_feature (1)..( 9): Result.005 file - promoters50/4768829
atataatta

SEQ ID NO: 190188 - DNA, 10 bp, Unknown
  misc_feature (1)..( 10): Result.005 file - promoters50/4768829
aaatgaattt

SEQ ID NO: 190189 - DNA, 12 bp, Unknown
  misc_feature (1)..( 12): Result.005 file - promoters50/4768829
tttgtctttgtt

SEQ ID NO: 190190 - DNA, 12 bp, Unknown
  misc_feature (1)..( 12): Result.005 file - promoters50/4768829
tatgtattttta

SEQ ID NO: 190191 - DNA, 12 bp, Unknown
  misc_feature (1)..( 12): Result.005 file - promoters50/4768829
aaaatattatta

SEQ ID NO: 190192 - DNA, 12 bp, Unknown
  misc_feature (1)..( 12): Result.005 file - promoters50/4768829
gatttattatgt

SEQ ID NO: 190193 - DNA, 12 bp, Unknown
  misc_feature (1)..( 12): Result.005 file - promoters50/4768829
atataattattt

SEQ ID NO: 190194 - DNA, 12 bp, Unknown
  misc_feature (1)..( 12): Result.005 file - promoters50/4768829
aatgaatttaga

SEQ ID NO: 190195 - DNA, 9 bp, Unknown
  misc_feature (1)..( 9): Result.005 file - promoters50/4768833
gcaaccaat

SEQ ID NO: 190196 - DNA, 9 bp, Unknown
  misc_feature (1)..( 9): Result.005 file - promoters50/4768833
gcaacaaat

SEQ ID NO: 190197 - DNA, 9 bp, Unknown
  misc_feature (1)..( 9): Result.005 file - promoters50/4768833
tttacaaat

SEQ ID NO: 190198 - DNA, 11 bp, Unknown
  misc_feature (1)..( 11): Result.005 file - promoters50/4768833
ccaaaacaaat

SEQ ID NO: 190199 - DNA, 11 bp, Unknown
  misc_feature (1)..( 11): Result.005 file - promoters50/4768833
aaaaaacaaaa

SEQ ID NO: 190200 - DNA, 12 bp, Unknown
  misc_feature (1)..( 12): Result.005 file - promoters50/4768833
ttacaacgaaaa

SEQ ID NO: 190201 - DNA, 12 bp, Unknown
  misc_feature (1)..( 12): Result.005 file - promoters50/4768833
aaaaaaccgtat

SEQ ID NO: 190202 - DNA, 7 bp, Unknown
  misc_feature (1)..( 7): Result.005 file - promoters50/4768833
aaaaaat

SEQ ID NO: 190203 - DNA, 7 bp, Unknown
  misc_feature (1)..( 7): Result.005 file - promoters50/4768833
aaacaat

SEQ ID NO: 190204 - DNA, 7 bp, Unknown
  misc_feature (1)..( 7): Result.005 file - promoters50/4768833
aaaaaaa

SEQ ID NO: 190205 - DNA, 8 bp, Unknown
  misc_feature (1)..( 8): Result.005 file - promoters50/4768848
aattaaat

SEQ ID NO: 190206 - DNA, 8 bp, Unknown
  misc_feature (1)..( 8): Result.005 file - promoters50/4768848
cattaaaa

SEQ ID NO: 190207 - DNA, 9 bp, Unknown
  misc_feature (1)..( 9): Result.005 file - promoters50/4768848
ctttataat

SEQ ID NO: 190208 - DNA, 9 bp, Unknown
  misc_feature (1)..( 9): Result.005 file - promoters50/4768848
acttcatag

SEQ ID NO: 190209 - DNA, 9 bp, Unknown
  misc_feature (1)..( 9): Result.005 file - promoters50/4768848
tggaaaata

SEQ ID NO: 190210 - DNA, 9 bp, Unknown
  misc_feature (1)..( 9): Result.005 file - promoters50/4768848
tggaaaatg

SEQ ID NO: 190211 - DNA, 9 bp, Unknown
  misc_feature (1)..( 9): Result.005 file - promoters50/4768848
cgtaaaata

SEQ ID NO: 190212 - DNA, 9 bp, Unknown
  misc_feature (1)..( 9): Result.005 file - promoters50/4768848
ttcaaaatg

SEQ ID NO: 190213 - DNA, 9 bp, Unknown
  misc_feature (1)..( 9): Result.005 file - promoters50/4768852
aaacaaaaa

SEQ ID NO: 190214 - DNA, 9 bp, Unknown
  misc_feature (1)..( 9): Result.005 file - promoters50/4768852
aaagaaaaa

SEQ ID NO: 190215 - DNA, 9 bp, Unknown
  misc_feature (1)..( 9): Result.005 file - promoters50/4768852
ccacaaaat

SEQ ID NO: 190216 - DNA, 9 bp, Unknown
  misc_feature (1)..( 9): Result.005 file - promoters50/4768852
agagagatt

SEQ ID NO: 190217 - DNA, 7 bp, Unknown
  misc_feature (1)..( 7): Result.005 file - promoters50/4768852
gtttaag

SEQ ID NO: 190218 - DNA, 7 bp, Unknown
  misc_feature (1)..( 7): Result.005 file - promoters50/4768852
gtttaaa

SEQ ID NO: 190219 - DNA, 7 bp, Unknown
  misc_feature (1)..( 7): Result.005 file - promoters50/4768852
ttttaaa

SEQ ID NO: 190220 - DNA, 12 bp, Unknown
  misc_feature (1)..( 12): Result.005 file - promoters50/4768852
aaattttagagt

SEQ ID NO: 190221 - DNA, 12 bp, Unknown
  misc_feature (1)..( 12): Result.005 file - promoters50/4768852
aaaatttatgca

SEQ ID NO: 190222 - DNA, 12 bp, Unknown
  misc_feature (1)..( 12): Result.005 file - promoters50/4768852
atcattaatgca

SEQ ID NO: 190223 - DNA, 14 bp, Unknown
  misc_feature (1)..( 14): Result.005 file - promoters50/4768852
ttaatttatgacca

SEQ ID NO: 190224 - DNA, 14 bp, Unknown
  misc_feature (1)..( 14): Result.005 file - promoters50/4768852
acaatttataacca

SEQ ID NO: 190225 - DNA, 14 bp, Unknown
  misc_feature (1)..( 14): Result.005 file - promoters50/4768852
acaagttagatata

SEQ ID NO: 190226 - DNA, 11 bp, Unknown
  misc_feature (1)..( 11): Result.005 file - promoters50/4768852
tctctataaaa

SEQ ID NO: 190227 - DNA, 11 bp, Unknown
  misc_feature (1)..( 11): Result.005 file - promoters50/4768852
agtcaataaaa

SEQ ID NO: 190228 - DNA, 11 bp, Unknown
  misc_feature (1)..( 11): Result.005 file - promoters50/4768852
tctatataaac

SEQ ID NO: 190229 - DNA, 14 bp, Unknown
  misc_feature (1)..( 14): Result.005 file - promoters50/4768856
tatacattatatag

SEQ ID NO: 190230 - DNA, 14 bp, Unknown
  misc_feature (1)..( 14): Result.005 file - promoters50/4768856
cataaattacaaat

SEQ ID NO: 190231 - DNA, 14 bp, Unknown
  misc_feature (1)..( 14): Result.005 file - promoters50/4768856
cataaatgtatcct

SEQ ID NO: 190232 - DNA, 14 bp, Unknown
  misc_feature (1)..( 14): Result.005 file - promoters50/4768856
catatatgtctgcg

SEQ ID NO: 190233 - DNA, 14 bp, Unknown
  misc_feature (1)..( 14): Result.005 file - promoters50/4768856
ggcaaattaaaaat

SEQ ID NO: 190234 - DNA, 14 bp, Unknown
  misc_feature (1)..( 14): Result.005 file - promoters50/4768856
attcaattaacttc

SEQ ID NO: 190235 - DNA, 11 bp, Unknown
  misc_feature (1)..( 11): Result.005 file - promoters50/4768856
cagtaaataat

SEQ ID NO: 190236 - DNA, 11 bp, Unknown
  misc_feature (1)..( 11): Result.005 file - promoters50/4768856
acgtaattaaa

SEQ ID NO: 190237 - DNA, 11 bp, Unknown
  misc_feature (1)..( 11): Result.005 file - promoters50/4768856
tagtaaaaacg

SEQ ID NO: 190238 - DNA, 11 bp, Unknown
  misc_feature (1)..( 11): Result.005 file - promoters50/4768856
taataaaaaaa

SEQ ID NO: 190239 - DNA, 11 bp, Unknown
  misc_feature (1)..( 11): Result.005 file - promoters50/4768856
acataaaatct

SEQ ID NO: 190240 - DNA, 11 bp, Unknown
  misc_feature (1)..( 11): Result.005 file - promoters50/4768856
gagtaacaacg

SEQ ID NO: 190241 - DNA, 8 bp, Unknown
  misc_feature (1)..( 8): Result.005 file - promoters50/4768860
acagtgaa

SEQ ID NO: 190242 - DNA, 8 bp, Unknown
  misc_feature (1)..( 8): Result.005 file - promoters50/4768860
acattgaa

SEQ ID NO: 190243 - DNA, 8 bp, Unknown
  misc_feature (1)..( 8): Result.005 file - promoters50/4768860
atattgaa

SEQ ID NO: 190244 - DNA, 8 bp, Unknown
  misc_feature (1)..( 8): Result.005 file - promoters50/4768864
aaggagct

SEQ ID NO: 190245 - DNA, 8 bp, Unknown
  misc_feature (1)..( 8): Result.005 file - promoters50/4768864
aaggagaa

SEQ ID NO: 190246 - DNA, 8 bp, Unknown
  misc_feature (1)..( 8): Result.005 file - promoters50/4768864
gaggagaa

SEQ ID NO: 190247 - DNA, 8 bp, Unknown
  misc_feature (1)..( 8): Result.005 file - promoters50/4768864
ttaatttg

SEQ ID NO: 190248 - DNA, 8 bp, Unknown
  misc_feature (1)..( 8): Result.005 file - promoters50/4768864
cgaatttg

SEQ ID NO: 190249 - DNA, 8 bp, Unknown
  misc_feature (1)..( 8): Result.005 file - promoters50/4768864
ttaatttc

SEQ ID NO: 190250 - DNA, 16 bp, Unknown
  misc_feature (1)..( 16): Result.005 file - promoters50/4768864
aagataaaataatttg

SEQ ID NO: 190251 - DNA, 16 bp, Unknown
  misc_feature (1)..( 16): Result.005 file - promoters50/4768864
taaataaaaatcccaa

SEQ ID NO: 190252 - DNA, 16 bp, Unknown
  misc_feature (1)..( 16): Result.005 file - promoters50/4768864
aaaagaaaaaaacaac

SEQ ID NO: 190253 - DNA, 16 bp, Unknown
  misc_feature (1)..( 16): Result.005 file - promoters50/4768864
aaaagaaaaattccaa

SEQ ID NO: 190254 - DNA, 15 bp, Unknown
  misc_feature (1)..( 15): Result.005 file - promoters50/4768864
aaataatttgcatag

SEQ ID NO: 190255 - DNA, 15 bp, Unknown
  misc_feature (1)..( 15): Result.005 file - promoters50/4768864
aaataaaaatcccaa

SEQ ID NO: 190256 - DNA, 15 bp, Unknown
  misc_feature (1)..( 15): Result.005 file - promoters50/4768864
gaataaaaaagaaaa

SEQ ID NO: 190257 - DNA, 15 bp, Unknown
  misc_feature (1)..( 15): Result.005 file - promoters50/4768864
aaagaaaaattccaa

SEQ ID NO: 190258 - DNA, 10 bp, Unknown
  misc_feature (1)..( 10): Result.005 file - promoters50/4768864
aaacgttgat

SEQ ID NO: 190259 - DNA, 10 bp, Unknown
  misc_feature (1)..( 10): Result.005 file - promoters50/4768864
tgacgatgat

SEQ ID NO: 190260 - DNA, 10 bp, Unknown
  misc_feature (1)..( 10): Result.005 file - promoters50/4768864
tgatgatgag

SEQ ID NO: 190261 - DNA, 7 bp, Unknown
  misc_feature (1)..( 7): Result.005 file - promoters50/4768864
ataaaaa

SEQ ID NO: 190262 - DNA, 7 bp, Unknown
  misc_feature (1)..( 7): Result.005 file - promoters50/4768864
ttaaaaa

SEQ ID NO: 190263 - DNA, 7 bp, Unknown
  misc_feature (1)..( 7): Result.005 file - promoters50/4768864
ttaaaat

SEQ ID NO: 190264 - DNA, 15 bp, Unknown
  misc_feature (1)..( 15): Result.005 file - promoters50/4768864
taggaaaagataaaa

SEQ ID NO: 190265 - DNA, 15 bp, Unknown
  misc_feature (1)..( 15): Result.005 file - promoters50/4768864
agaaaaaagaaaaat

SEQ ID NO: 190266 - DNA, 15 bp, Unknown
  misc_feature (1)..( 15): Result.005 file - promoters50/4768864
aaataaaaatcccaa

SEQ ID NO: 190267 - DNA, 9 bp, Unknown
  misc_feature (1)..( 9): Result.005 file - promoters50/4768864
tcgaattct

SEQ ID NO: 190268 - DNA, 9 bp, Unknown
  misc_feature (1)..( 9): Result.005 file - promoters50/4768864
ttgaattct

SEQ ID NO: 190269 - DNA, 9 bp, Unknown
  misc_feature (1)..( 9): Result.005 file - promoters50/4768864
ttgaattag

SEQ ID NO: 190270 - DNA, 14 bp, Unknown
  misc_feature (1)..( 14): Result.005 file - promoters50/4768864
tcccaaaaaaaaca

SEQ ID NO: 190271 - DNA, 14 bp, Unknown
  misc_feature (1)..( 14): Result.005 file - promoters50/4768864
agaaaaaaacaaca

SEQ ID NO: 190272 - DNA, 14 bp, Unknown
  misc_feature (1)..( 14): Result.005 file - promoters50/4768864
caagaaaaaaaaaa

SEQ ID NO: 190273 - DNA, 7 bp, Unknown
  misc_feature (1)..( 7): Result.005 file - promoters50/4768880
cttctct

SEQ ID NO: 190274 - DNA, 7 bp, Unknown
  misc_feature (1)..( 7): Result.005 file - promoters50/4768880
gttctct

SEQ ID NO: 190275 - DNA, 7 bp, Unknown
  misc_feature (1)..( 7): Result.005 file - promoters50/4768880
cttctca

SEQ ID NO: 190276 - DNA, 8 bp, Unknown
  misc_feature (1)..( 8): Result.005 file - promoters50/4768928
aaagaaaa

SEQ ID NO: 190277 - DNA, 8 bp, Unknown
  misc_feature (1)..( 8): Result.005 file - promoters50/4768928
aaacaaaa

SEQ ID NO: 190278 - DNA, 8 bp, Unknown
  misc_feature (1)..( 8): Result.005 file - promoters50/4768928
aaagaaag

SEQ ID NO: 190279 - DNA, 7 bp, Unknown
  misc_feature (1)..( 7): Result.005 file - promoters50/4769032
agagagg

SEQ ID NO: 190280 - DNA, 7 bp, Unknown
  misc_feature (1)..( 7): Result.005 file - promoters50/4769032
tgagagg

SEQ ID NO: 190281 - DNA, 7 bp, Unknown
  misc_feature (1)..( 7): Result.005 file - promoters50/4769032
tgagaga

SEQ ID NO: 190282 - DNA, 10 bp, Unknown
  misc_feature (1)..( 10): Result.005 file - promoters50/4769032
acacataatt

SEQ ID NO: 190283 - DNA, 10 bp, Unknown
  misc_feature (1)..( 10): Result.005 file - promoters50/4769032
acacctaatt

SEQ ID NO: 190284 - DNA, 10 bp, Unknown
  misc_feature (1)..( 10): Result.005 file - promoters50/4769032
ttaccaaatg

SEQ ID NO: 190285 - DNA, 14 bp, Unknown
  misc_feature (1)..( 14): Result.005 file - promoters50/4769032
agcgaaaaaaagaa

SEQ ID NO: 190286 - DNA, 14 bp, Unknown
  misc_feature (1)..( 14): Result.005 file - promoters50/4769032
aattaaaaaagggt

SEQ ID NO: 190287 - DNA, 14 bp, Unknown
  misc_feature (1)..( 14): Result.005 file - promoters50/4769032
aaagaaaaaaaaga

SEQ ID NO: 190288 - DNA, 9 bp, Unknown
  misc_feature (1)..( 9): Result.005 file - promoters50/4769032
agtcaaaaa

SEQ ID NO: 190289 - DNA, 9 bp, Unknown
  misc_feature (1)..( 9): Result.005 file - promoters50/4769032
ggtcaaatc

SEQ ID NO: 190290 - DNA, 9 bp, Unknown
  misc_feature (1)..( 9): Result.005 file - promoters50/4769032
agtcaaaaa

SEQ ID NO: 190291 - DNA, 9 bp, Unknown
  misc_feature (1)..( 9): Result.005 file - promoters50/4769032
tctcaaaaa

SEQ ID NO: 190292 - DNA, 7 bp, Unknown
  misc_feature (1)..( 7): Result.005 file - promoters50/4769032
cgagaga

SEQ ID NO: 190293 - DNA, 7 bp, Unknown
  misc_feature (1)..( 7): Result.005 file - promoters50/4769032
tgagaga

SEQ ID NO: 190294 - DNA, 7 bp, Unknown
  misc_feature (1)..( 7): Result.005 file - promoters50/4769032
tgagagg

SEQ ID NO: 190295 - DNA, 8 bp, Unknown
  misc_feature (1)..( 8): Result.005 file - promoters50/4769048
aaatttca

SEQ ID NO: 190296 - DNA, 8 bp, Unknown
  misc_feature (1)..( 8): Result.005 file - promoters50/4769048
aaatttgg

SEQ ID NO: 190297 - DNA, 8 bp, Unknown
  misc_feature (1)..( 8): Result.005 file - promoters50/4769048
gaatttgg

SEQ ID NO: 190298 - DNA, 7 bp, Unknown
  misc_feature (1)..( 7): Result.005 file - promoters50/4769048
aatttgg

SEQ ID NO: 190299 - DNA, 7 bp, Unknown
  misc_feature (1)..( 7): Result.005 file - promoters50/4769048
aatttgg

SEQ ID NO: 190300 - DNA, 7 bp, Unknown
  misc_feature (1)..( 7): Result.005 file - promoters50/4769048
aatttgg

SEQ ID NO: 190301 - DNA, 12 bp, Unknown
  misc_feature (1)..( 12): Result.005 file - promoters50/4769055
gaaagttaaatt

SEQ ID NO: 190302 - DNA, 12 bp, Unknown
  misc_feature (1)..( 12): Result.005 file - promoters50/4769055
gaaggttttatg

SEQ ID NO: 190303 - DNA, 12 bp, Unknown
  misc_feature (1)..( 12): Result.005 file - promoters50/4769055
caaaattaaggg

SEQ ID NO: 190304 - DNA, 12 bp, Unknown
  misc_feature (1)..( 12): Result.005 file - promoters50/4769055
aaaatttataat

SEQ ID NO: 190305 - DNA, 13 bp, Unknown
  misc_feature (1)..( 13): Result.005 file - promoters50/4769055
aaaatatttgtaa

SEQ ID NO: 190306 - DNA, 13 bp, Unknown
  misc_feature (1)..( 13): Result.005 file - promoters50/4769055
ataaaattaacta

SEQ ID NO: 190307 - DNA, 13 bp, Unknown
  misc_feature (1)..( 13): Result.005 file - promoters50/4769055
ttctcgtttataa

SEQ ID NO: 190308 - DNA, 13 bp, Unknown
  misc_feature (1)..( 13): Result.005 file - promoters50/4769055
tttaaattatacc

SEQ ID NO: 190309 - DNA, 13 bp, Unknown
  misc_feature (1)..( 13): Result.005 file - promoters50/4769055
tttcaattttctc

SEQ ID NO: 190310 - DNA, 13 bp, Unknown
  misc_feature (1)..( 13): Result.005 file - promoters50/4769055
ataaaatatttgt

SEQ ID NO: 190311 - DNA, 14 bp, Unknown
  misc_feature (1)..( 14): Result.005 file - promoters50/4769055
cataaaattaacta

SEQ ID NO: 190312 - DNA, 13 bp, Unknown
  misc_feature (1)..( 13): Result.005 file - promoters50/4769055
taaaaatttataa

SEQ ID NO: 190313 - DNA, 14 bp, Unknown
  misc_feature (1)..( 14): Result.005 file - promoters50/4769055
tttataatcatagg

SEQ ID NO: 190314 - DNA, 18 bp, Unknown
  misc_feature (1)..( 18): Result.005 file - promoters50/4769055
ccgaaaagcaaaaccaag

SEQ ID NO: 190315 - DNA, 18 bp, Unknown
  misc_feature (1)..( 18): Result.005 file - promoters50/4769055
tggaagagcaaaacataa

SEQ ID NO: 190316 - DNA, 18 bp, Unknown
  misc_feature (1)..( 18): Result.005 file - promoters50/4769055
accggaatcaaaacaaat

SEQ ID NO: 190317 - DNA, 18 bp, Unknown
  misc_feature (1)..( 18): Result.005 file - promoters50/4769055
ccgaaaacactgtcaatg

SEQ ID NO: 190318 - DNA, 18 bp, Unknown
  misc_feature (1)..( 18): Result.005 file - promoters50/4769055
ataacaaacaatacataa

SEQ ID NO: 190319 - DNA, 18 bp, Unknown
  misc_feature (1)..( 18): Result.005 file - promoters50/4769055
ttgatatacaaaaaaaaa

SEQ ID NO: 190320 - DNA, 12 bp, Unknown
  misc_feature (1)..( 12): Result.005 file - promoters50/4769059
ctatctctttat

SEQ ID NO: 190321 - DNA, 12 bp, Unknown
  misc_feature (1)..( 12): Result.005 file - promoters50/4769059
ttatatctgtat

SEQ ID NO: 190322 - DNA, 12 bp, Unknown
  misc_feature (1)..( 12): Result.005 file - promoters50/4769059
ctagctcgcgtc

SEQ ID NO: 190323 - DNA, 12 bp, Unknown
  misc_feature (1)..( 12): Result.005 file - promoters50/4769059
ttagatcgtacc

SEQ ID NO: 190324 - DNA, 9 bp, Unknown
  misc_feature (1)..( 9): Result.005 file - promoters50/4769075
ttttgattt

SEQ ID NO: 190325 - DNA, 9 bp, Unknown
  misc_feature (1)..( 9): Result.005 file - promoters50/4769075
aggtgattt

SEQ ID NO: 190326 - DNA, 9 bp, Unknown
  misc_feature (1)..( 9): Result.005 file - promoters50/4769075
tttggattt

SEQ ID NO: 190327 - DNA, 13 bp, Unknown
  misc_feature (1)..( 13): Result.005 file - promoters50/4769075
aaactttacattc

SEQ ID NO: 190328 - DNA, 13 bp, Unknown
  misc_feature (1)..( 13): Result.005 file - promoters50/4769075
acactatactgta

SEQ ID NO: 190329 - DNA, 13 bp, Unknown
  misc_feature (1)..( 13): Result.005 file - promoters50/4769075
caactctattctg

SEQ ID NO: 190330 - DNA, 9 bp, Unknown
  misc_feature (1)..( 9): Result.005 file - promoters50/4769083
ttaatttat

SEQ ID NO: 190331 - DNA, 9 bp, Unknown
  misc_feature (1)..( 9): Result.005 file - promoters50/4769083
ttatttttg

SEQ ID NO: 190332 - DNA, 9 bp, Unknown
  misc_feature (1)..( 9): Result.005 file - promoters50/4769083
taaatttat

SEQ ID NO: 190333 - DNA, 7 bp, Unknown
  misc_feature (1)..( 7): Result.005 file - promoters50/4769083
aatttat

SEQ ID NO: 190334 - DNA, 7 bp, Unknown
  misc_feature (1)..( 7): Result.005 file - promoters50/4769083
catttat

SEQ ID NO: 190335 - DNA, 7 bp, Unknown
  misc_feature (1)..( 7): Result.005 file - promoters50/4769083
aatttat

SEQ ID NO: 190336 - DNA, 7 bp, Unknown
  misc_feature (1)..( 7): Result.005 file - promoters50/4769083
taaaata

SEQ ID NO: 190337 - DNA, 7 bp, Unknown
  misc_feature (1)..( 7): Result.005 file - promoters50/4769083
aaaaata

SEQ ID NO: 190338 - DNA, 7 bp, Unknown
  misc_feature (1)..( 7): Result.005 file - promoters50/4769083
taaaatg

SEQ ID NO: 190339 - DNA, 9 bp, Unknown
  misc_feature (1)..( 9): Result.005 file - promoters50/4769083
taaagaaaa

SEQ ID NO: 190340 - DNA, 9 bp, Unknown
  misc_feature (1)..( 9): Result.005 file - promoters50/4769083
taaagaaaa

SEQ ID NO: 190341 - DNA, 9 bp, Unknown
  misc_feature (1)..( 9): Result.005 file - promoters50/4769083
aaaagtaaa

SEQ ID NO: 190342 - DNA, 8 bp, Unknown
  misc_feature (1)..( 8): Result.005 file - promoters50/4769083
aaaataaa

SEQ ID NO: 190343 - DNA, 8 bp, Unknown
  misc_feature (1)..( 8): Result.005 file - promoters50/4769083
aaattaaa

SEQ ID NO: 190344 - DNA, 8 bp, Unknown
  misc_feature (1)..( 8): Result.005 file - promoters50/4769083
aaagtaaa

SEQ ID NO: 190345 - DNA, 8 bp, Unknown
  misc_feature (1)..( 8): Result.005 file - promoters50/4769083
ctacaaat

SEQ ID NO: 190346 - DNA, 8 bp, Unknown
  misc_feature (1)..( 8): Result.005 file - promoters50/4769083
ctaaaaat

SEQ ID NO: 190347 - DNA, 8 bp, Unknown
  misc_feature (1)..( 8): Result.005 file - promoters50/4769083
ataaaaaa

SEQ ID NO: 190348 - DNA, 7 bp, Unknown
  misc_feature (1)..( 7): Result.005 file - promoters50/4769087
ggaaaat

SEQ ID NO: 190349 - DNA, 7 bp, Unknown
  misc_feature (1)..( 7): Result.005 file - promoters50/4769087
agaaaat

SEQ ID NO: 190350 - DNA, 7 bp, Unknown
  misc_feature (1)..( 7): Result.005 file - promoters50/4769087
agaaaac

SEQ ID NO: 190351 - DNA, 7 bp, Unknown
  misc_feature (1)..( 7): Result.005 file - promoters50/4769087
tccaaaa

SEQ ID NO: 190352 - DNA, 7 bp, Unknown
  misc_feature (1)..( 7): Result.005 file - promoters50/4769087
cccaaaa

SEQ ID NO: 190353 - DNA, 7 bp, Unknown
  misc_feature (1)..( 7): Result.005 file - promoters50/4769087
tccaaaa

SEQ ID NO: 190354 - DNA, 8 bp, Unknown
  misc_feature (1)..( 8): Result.005 file - promoters50/4769087
aaaatttc

SEQ ID NO: 190355 - DNA, 8 bp, Unknown
  misc_feature (1)..( 8): Result.005 file - promoters50/4769087
aaaatttc

SEQ ID NO: 190356 - DNA, 8 bp, Unknown
  misc_feature (1)..( 8): Result.005 file - promoters50/4769087
aaaattga

SEQ ID NO: 190357 - DNA, 8 bp, Unknown
  misc_feature (1)..( 8): Result.005 file - promoters50/4769087
ttttgaac

SEQ ID NO: 190358 - DNA, 8 bp, Unknown
  misc_feature (1)..( 8): Result.005 file - promoters50/4769087
ttttgact

SEQ ID NO: 190359 - DNA, 8 bp, Unknown
  misc_feature (1)..( 8): Result.005 file - promoters50/4769087
tttttaac

SEQ ID NO: 190360 - DNA, 9 bp, Unknown
  misc_feature (1)..( 9): Result.005 file - promoters50/4769096
tgttttagt

SEQ ID NO: 190361 - DNA, 9 bp, Unknown
  misc_feature (1)..( 9): Result.005 file - promoters50/4769096
tctttcagt

SEQ ID NO: 190362 - DNA, 9 bp, Unknown
  misc_feature (1)..( 9): Result.005 file - promoters50/4769096
tctctcacg

SEQ ID NO: 190363 - DNA, 9 bp, Unknown
  misc_feature (1)..( 9): Result.005 file - promoters50/4769107
aaaaacaat

SEQ ID NO: 190364 - DNA, 9 bp, Unknown
  misc_feature (1)..( 9): Result.005 file - promoters50/4769107
ataaacaaa

SEQ ID NO: 190365 - DNA, 9 bp, Unknown
  misc_feature (1)..( 9): Result.005 file - promoters50/4769107
aaaaacaaa

SEQ ID NO: 190366 - DNA, 9 bp, Unknown
  misc_feature (1)..( 9): Result.005 file - promoters50/4769107
tcatacaca

SEQ ID NO: 190367 - DNA, 8 bp, Unknown
  misc_feature (1)..( 8): Result.005 file - promoters50/4769107
caattaac

SEQ ID NO: 190368 - DNA, 8 bp, Unknown
  misc_feature (1)..( 8): Result.005 file - promoters50/4769107
gaataaac

SEQ ID NO: 190369 - DNA, 8 bp, Unknown
  misc_feature (1)..( 8): Result.005 file - promoters50/4769107
caattatg

SEQ ID NO: 190370 - DNA, 9 bp, Unknown
  misc_feature (1)..( 9): Result.005 file - promoters50/4769107
ttcttttat

SEQ ID NO: 190371 - DNA, 9 bp, Unknown
  misc_feature (1)..( 9): Result.005 file - promoters50/4769107
ttctttttt

SEQ ID NO: 190372 - DNA, 9 bp, Unknown
  misc_feature (1)..( 9): Result.005 file - promoters50/4769107
ttctttttt

SEQ ID NO: 190373 - DNA, 10 bp, Unknown
  misc_feature (1)..( 10): Result.005 file - promoters50/4769107
cttttatcat

SEQ ID NO: 190374 - DNA, 10 bp, Unknown
  misc_feature (1)..( 10): Result.005 file - promoters50/4769107
tttttatatt

SEQ ID NO: 190375 - DNA, 11 bp, Unknown
  misc_feature (1)..( 11): Result.005 file - promoters50/4769107
gtttctatatt

SEQ ID NO: 190376 - DNA, 11 bp, Unknown
  misc_feature (1)..( 11): Result.005 file - promoters50/4769107
ttttttatagc

SEQ ID NO: 190377 - DNA, 9 bp, Unknown
  misc_feature (1)..( 9): Result.005 file - promoters50/4769107
ttttaaaaa

SEQ ID NO: 190378 - DNA, 9 bp, Unknown
  misc_feature (1)..( 9): Result.005 file - promoters50/4769107
ctttacaaa

SEQ ID NO: 190379 - DNA, 9 bp, Unknown
  misc_feature (1)..( 9): Result.005 file - promoters50/4769107
ttttaaagc

SEQ ID NO: 190380 - DNA, 9 bp, Unknown
  misc_feature (1)..( 9): Result.005 file - promoters50/4769107
ttttttttc

SEQ ID NO: 190381 - DNA, 9 bp, Unknown
  misc_feature (1)..( 9): Result.005 file - promoters50/4769107
tttgttttc

SEQ ID NO: 190382 - DNA, 9 bp, Unknown
  misc_feature (1)..( 9): Result.005 file - promoters50/4769107
tttattttt

SEQ ID NO: 190383 - DNA, 8 bp, Unknown
  misc_feature (1)..( 8): Result.005 file - promoters50/4769107
aaaaatga

SEQ ID NO: 190384 - DNA, 8 bp, Unknown
  misc_feature (1)..( 8): Result.005 file - promoters50/4769107
gaaaatga

SEQ ID NO: 190385 - DNA, 8 bp, Unknown
  misc_feature (1)..( 8): Result.005 file - promoters50/4769107
gaaaataa

SEQ ID NO: 190386 - DNA, 8 bp, Unknown
  misc_feature (1)..( 8): Result.005 file - promoters50/4769107
aaataaat

SEQ ID NO: 190387 - DNA, 8 bp, Unknown
  misc_feature (1)..( 8): Result.005 file - promoters50/4769107
aaatcaat

SEQ ID NO: 190388 - DNA, 8 bp, Unknown
  misc_feature (1)..( 8): Result.005 file - promoters50/4769107
ggatcaat

SEQ ID NO: 190389 - DNA, 9 bp, Unknown
  misc_feature (1)..( 9): Result.005 file - promoters50/4769107
atttttaaa

SEQ ID NO: 190390 - DNA, 9 bp, Unknown
  misc_feature (1)..( 9): Result.005 file - promoters50/4769107
ttttttata

SEQ ID NO: 190391 - DNA, 9 bp, Unknown
  misc_feature (1)..( 9): Result.005 file - promoters50/4769107
ttttttata

SEQ ID NO: 190392 - DNA, 7 bp, Unknown
  misc_feature (1)..( 7): Result.005 file - promoters50/4769107
acaaaat

SEQ ID NO: 190393 - DNA, 7 bp, Unknown
  misc_feature (1)..( 7): Result.005 file - promoters50/4769107
acaaaat

SEQ ID NO: 190394 - DNA, 7 bp, Unknown
  misc_feature (1)..( 7): Result.005 file - promoters50/4769107
acaaaaa

SEQ ID NO: 190395 - DNA, 9 bp, Unknown
  misc_feature (1)..( 9): Result.005 file - promoters50/4769127
aaagttttc

SEQ ID NO: 190396 - DNA, 9 bp, Unknown
  misc_feature (1)..( 9): Result.005 file - promoters50/4769127
tgagtattc

SEQ ID NO: 190397 - DNA, 9 bp, Unknown
  misc_feature (1)..( 9): Result.005 file - promoters50/4769127
aaacttttt

SEQ ID NO: 190398 - DNA, 7 bp, Unknown
  misc_feature (1)..( 7): Result.005 file - promoters50/4769127
atggaaa

SEQ ID NO: 190399 - DNA, 7 bp, Unknown
  misc_feature (1)..( 7): Result.005 file - promoters50/4769127
atggaat

SEQ ID NO: 190400 - DNA, 7 bp, Unknown
  misc_feature (1)..( 7): Result.005 file - promoters50/4769127
atgtaat

SEQ ID NO: 190401 - DNA, 10 bp, Unknown
  misc_feature (1)..( 10): Result.005 file - promoters50/4769127
atcataaaaa

SEQ ID NO: 190402 - DNA, 10 bp, Unknown
  misc_feature (1)..( 10): Result.005 file - promoters50/4769127
gtcaaaaaaa

SEQ ID NO: 190403 - DNA, 10 bp, Unknown
  misc_feature (1)..( 10): Result.005 file - promoters50/4769127
gtcaaatcct

SEQ ID NO: 190404 - DNA, 9 bp, Unknown
  misc_feature (1)..( 9): Result.005 file - promoters50/4769127
attacaaaa

SEQ ID NO: 190405 - DNA, 9 bp, Unknown
  misc_feature (1)..( 9): Result.005 file - promoters50/4769127
attaaaaaa

SEQ ID NO: 190406 - DNA, 9 bp, Unknown
  misc_feature (1)..( 9): Result.005 file - promoters50/4769127
aagaaaaaa

SEQ ID NO: 190407 - DNA, 12 bp, Unknown
  misc_feature (1)..( 12): Result.005 file - promoters50/4769137
ttttctttttat

SEQ ID NO: 190408 - DNA, 12 bp, Unknown
  misc_feature (1)..( 12): Result.005 file - promoters50/4769137
ttttctttttat

SEQ ID NO: 190409 - DNA, 12 bp, Unknown
  misc_feature (1)..( 12): Result.005 file - promoters50/4769137
tttactttgttt

SEQ ID NO: 190410 - DNA, 13 bp, Unknown
  misc_feature (1)..( 13): Result.005 file - promoters50/4769137
tttgtctatcaaa

SEQ ID NO: 190411 - DNA, 13 bp, Unknown
  misc_feature (1)..( 13): Result.005 file - promoters50/4769137
ctctacattgtct

SEQ ID NO: 190412 - DNA, 13 bp, Unknown
  misc_feature (1)..( 13): Result.005 file - promoters50/4769137
aactaaattggga

SEQ ID NO: 190413 - DNA, 10 bp, Unknown
  misc_feature (1)..( 10): Result.005 file - promoters50/4769137
catcatatga

SEQ ID NO: 190414 - DNA, 10 bp, Unknown
  misc_feature (1)..( 10): Result.005 file - promoters50/4769137
cttcacatgt

SEQ ID NO: 190415 - DNA, 10 bp, Unknown
  misc_feature (1)..( 10): Result.005 file - promoters50/4769137
cttaacactc

SEQ ID NO: 190416 - DNA, 10 bp, Unknown
  misc_feature (1)..( 10): Result.005 file - promoters50/4769137
ggaaacatgt

SEQ ID NO: 190417 - DNA, 10 bp, Unknown
  misc_feature (1)..( 10): Result.005 file - promoters50/4769137
gttcacagag

SEQ ID NO: 190418 - DNA, 10 bp, Unknown
  misc_feature (1)..( 10): Result.005 file - promoters50/4769137
gtttacaccc

SEQ ID NO: 190419 - DNA, 10 bp, Unknown
  misc_feature (1)..( 10): Result.005 file - promoters50/4769141
tctatataaa

SEQ ID NO: 190420 - DNA, 10 bp, Unknown
  misc_feature (1)..( 10): Result.005 file - promoters50/4769141
catatatatc

SEQ ID NO: 190421 - DNA, 10 bp, Unknown
  misc_feature (1)..( 10): Result.005 file - promoters50/4769141
tctatataat

SEQ ID NO: 190422 - DNA, 10 bp, Unknown
  misc_feature (1)..( 10): Result.005 file - promoters50/4769141
ccaatataaa

SEQ ID NO: 190423 - DNA, 10 bp, Unknown
  misc_feature (1)..( 10): Result.005 file - promoters50/4769141
ccaatataat

SEQ ID NO: 190424 - DNA, 10 bp, Unknown
  misc_feature (1)..( 10): Result.005 file - promoters50/4769141
gttatatata

SEQ ID NO: 190425 - DNA, 10 bp, Unknown
  misc_feature (1)..( 10): Result.005 file - promoters50/4769141
attatttaaa

SEQ ID NO: 190426 - DNA, 9 bp, Unknown
  misc_feature (1)..( 9): Result.005 file - promoters50/4769141
aaaaaaatg

SEQ ID NO: 190427 - DNA, 9 bp, Unknown
  misc_feature (1)..( 9): Result.005 file - promoters50/4769141
gaaaacatg

SEQ ID NO: 190428 - DNA, 9 bp, Unknown
  misc_feature (1)..( 9): Result.005 file - promoters50/4769141
ccaaaaatt

SEQ ID NO: 190429 - DNA, 9 bp, Unknown
  misc_feature (1)..( 9): Result.005 file - promoters50/4769141
taaataatg

SEQ ID NO: 190430 - DNA, 9 bp, Unknown
  misc_feature (1)..( 9): Result.005 file - promoters50/4769141
caaaagtta

SEQ ID NO: 190431 - DNA, 9 bp, Unknown
  misc_feature (1)..( 9): Result.005 file - promoters50/4769141
ctaaaattg

SEQ ID NO: 190432 - DNA, 11 bp, Unknown
  misc_feature (1)..( 11): Result.005 file - promoters50/4769141
ttagtaaaacc

SEQ ID NO: 190433 - DNA, 11 bp, Unknown
  misc_feature (1)..( 11): Result.005 file - promoters50/4769141
ttaataaaacg

SEQ ID NO: 190434 - DNA, 11 bp, Unknown
  misc_feature (1)..( 11): Result.005 file - promoters50/4769141
tgtgtagaacc

SEQ ID NO: 190435 - DNA, 11 bp, Unknown
  misc_feature (1)..( 11): Result.005 file - promoters50/4769141
gtggtaaaata

SEQ ID NO: 190436 - DNA, 11 bp, Unknown
  misc_feature (1)..( 11): Result.005 file - promoters50/4769141
ctaataaatag

SEQ ID NO: 190437 - DNA, 11 bp, Unknown
  misc_feature (1)..( 11): Result.005 file - promoters50/4769141
tcaataaaata

SEQ ID NO: 190438 - DNA, 11 bp, Unknown
  misc_feature (1)..( 11): Result.005 file - promoters50/4769141
tgtcttttagc

SEQ ID NO: 190439 - DNA, 11 bp, Unknown
  misc_feature (1)..( 11): Result.005 file - promoters50/4769141
tctcttttccg

SEQ ID NO: 190440 - DNA, 11 bp, Unknown
  misc_feature (1)..( 11): Result.005 file - promoters50/4769141
ctacttttaag

SEQ ID NO: 190441 - DNA, 11 bp, Unknown
  misc_feature (1)..( 11): Result.005 file - promoters50/4769141
ttgattttaaa

SEQ ID NO: 190442 - DNA, 11 bp, Unknown
  misc_feature (1)..( 11): Result.005 file - promoters50/4769141
atttttttaat

SEQ ID NO: 190443 - DNA, 11 bp, Unknown
  misc_feature (1)..( 11): Result.005 file - promoters50/4769141
tttattttagt

SEQ ID NO: 190444 - DNA, 11 bp, Unknown
  misc_feature (1)..( 11): Result.005 file - promoters50/4769141
tttctttgtat

SEQ ID NO: 190445 - DNA, 7 bp, Unknown
  misc_feature (1)..( 7): Result.005 file - promoters50/4769145
ttttaat

SEQ ID NO: 190446 - DNA, 7 bp, Unknown
  misc_feature (1)..( 7): Result.005 file - promoters50/4769145
ttttaac

SEQ ID NO: 190447 - DNA, 7 bp, Unknown
  misc_feature (1)..( 7): Result.005 file - promoters50/4769145
atttaac

SEQ ID NO: 190448 - DNA, 12 bp, Unknown
  misc_feature (1)..( 12): Result.005 file - promoters50/4769149
aaacataaataa

SEQ ID NO: 190449 - DNA, 12 bp, Unknown
  misc_feature (1)..( 12): Result.005 file - promoters50/4769149
aaacataaataa

SEQ ID NO: 190450 - DNA, 12 bp, Unknown
  misc_feature (1)..( 12): Result.005 file - promoters50/4769149
aaatatagtttc

SEQ ID NO: 190451 - DNA, 8 bp, Unknown
  misc_feature (1)..( 8): Result.005 file - promoters50/4769149
tatgattg

SEQ ID NO: 190452 - DNA, 8 bp, Unknown
  misc_feature (1)..( 8): Result.005 file - promoters50/4769149
tattatta

SEQ ID NO: 190453 - DNA, 8 bp, Unknown
  misc_feature (1)..( 8): Result.005 file - promoters50/4769149
tatcattt

SEQ ID NO: 190454 - DNA, 8 bp, Unknown
  misc_feature (1)..( 8): Result.005 file - promoters50/4769149
aatcattt

SEQ ID NO: 190455 - DNA, 11 bp, Unknown
  misc_feature (1)..( 11): Result.005 file - promoters50/4769149
cttctttaatt

SEQ ID NO: 190456 - DNA, 11 bp, Unknown
  misc_feature (1)..( 11): Result.005 file - promoters50/4769149
tttcttttctt

SEQ ID NO: 190457 - DNA, 11 bp, Unknown
  misc_feature (1)..( 11): Result.005 file - promoters50/4769149
attttttttct

SEQ ID NO: 190458 - DNA, 8 bp, Unknown
  misc_feature (1)..( 8): Result.005 file - promoters50/4769149
tcttattt

SEQ ID NO: 190459 - DNA, 8 bp, Unknown
  misc_feature (1)..( 8): Result.005 file - promoters50/4769149
tcttattt

SEQ ID NO: 190460 - DNA, 8 bp, Unknown
  misc_feature (1)..( 8): Result.005 file - promoters50/4769149
cgttattt

SEQ ID NO: 190461 - DNA, 8 bp, Unknown
  misc_feature (1)..( 8): Result.005 file - promoters50/4769149
aaataaaa

SEQ ID NO: 190462 - DNA, 8 bp, Unknown
  misc_feature (1)..( 8): Result.005 file - promoters50/4769149
caatcaaa

SEQ ID NO: 190463 - DNA, 9 bp, Unknown
  misc_feature (1)..( 9): Result.005 file - promoters50/4769149
aaactaaag

SEQ ID NO: 190464 - DNA, 9 bp, Unknown
  misc_feature (1)..( 9): Result.005 file - promoters50/4769149
ttttgttaa

SEQ ID NO: 190465 - DNA, 9 bp, Unknown
  misc_feature (1)..( 9): Result.005 file - promoters50/4769149
ttttgttgt

SEQ ID NO: 190466 - DNA, 9 bp, Unknown
  misc_feature (1)..( 9): Result.005 file - promoters50/4769149
cgttgataa

SEQ ID NO: 190467 - DNA, 6 bp, Unknown
  misc_feature (1)..( 6): Result.005 file - promoters50/4769149
aaagaa

SEQ ID NO: 190468 - DNA, 6 bp, Unknown
  misc_feature (1)..( 6): Result.005 file - promoters50/4769149
aaagaa

SEQ ID NO: 190469 - DNA, 6 bp, Unknown
  misc_feature (1)..( 6): Result.005 file - promoters50/4769149
aaagaa

SEQ ID NO: 190470 - DNA, 9 bp, Unknown
  misc_feature (1)..( 9): Result.005 file - promoters50/4769149
atatttaat

SEQ ID NO: 190471 - DNA, 9 bp, Unknown
  misc_feature (1)..( 9): Result.005 file - promoters50/4769149
cattttaat

SEQ ID NO: 190472 - DNA, 9 bp, Unknown
  misc_feature (1)..( 9): Result.005 file - promoters50/4769149
ataattaaa

SEQ ID NO: 190473 - DNA, 8 bp, Unknown
  misc_feature (1)..( 8): Result.005 file - promoters50/4769149
caatgatt

SEQ ID NO: 190474 - DNA, 8 bp, Unknown
  misc_feature (1)..( 8): Result.005 file - promoters50/4769149
caatgatt

SEQ ID NO: 190475 - DNA, 8 bp, Unknown
  misc_feature (1)..( 8): Result.005 file - promoters50/4769149
gaatgatt

SEQ ID NO: 190476 - DNA, 12 bp, Unknown
  misc_feature (1)..( 12): Result.005 file - promoters50/4769153
atatataatatt

SEQ ID NO: 190477 - DNA, 12 bp, Unknown
  misc_feature (1)..( 12): Result.005 file - promoters50/4769153
ttataaaataca

SEQ ID NO: 190478 - DNA, 12 bp, Unknown
  misc_feature (1)..( 12): Result.005 file - promoters50/4769153
ataaataacatt

SEQ ID NO: 190479 - DNA, 12 bp, Unknown
  misc_feature (1)..( 12): Result.005 file - promoters50/4769153
ataaataaaagc

SEQ ID NO: 190480 - DNA, 12 bp, Unknown
  misc_feature (1)..( 12): Result.005 file - promoters50/4769153
acaaagaaaatt

SEQ ID NO: 190481 - DNA, 14 bp, Unknown
  misc_feature (1)..( 14): Result.005 file - promoters50/4769153
aaaacagtaaaacc

SEQ ID NO: 190482 - DNA, 14 bp, Unknown
  misc_feature (1)..( 14): Result.005 file - promoters50/4769153
tggaaaacaaaact

SEQ ID NO: 190483 - DNA, 10 bp, Unknown
  misc_feature (1)..( 10): Result.005 file - promoters50/4769153
atatttttta

SEQ ID NO: 190484 - DNA, 10 bp, Unknown
  misc_feature (1)..( 10): Result.005 file - promoters50/4769153
aaattgttta

SEQ ID NO: 190485 - DNA, 10 bp, Unknown
  misc_feature (1)..( 10): Result.005 file - promoters50/4769153
ttatttttgt

SEQ ID NO: 190486 - DNA, 10 bp, Unknown
  misc_feature (1)..( 10): Result.005 file - promoters50/4769153
aaaatgtagt

SEQ ID NO: 190487 - DNA, 10 bp, Unknown
  misc_feature (1)..( 10): Result.005 file - promoters50/4769153
aaaataaata

SEQ ID NO: 190488 - DNA, 10 bp, Unknown
  misc_feature (1)..( 10): Result.005 file - promoters50/4769153
caaacatata

SEQ ID NO: 190489 - DNA, 10 bp, Unknown
  misc_feature (1)..( 10): Result.005 file - promoters50/4769153
ttaataaagc

SEQ ID NO: 190490 - DNA, 9 bp, Unknown
  misc_feature (1)..( 9): Result.005 file - promoters50/4769153
ttatatata

SEQ ID NO: 190491 - DNA, 9 bp, Unknown
  misc_feature (1)..( 9): Result.005 file - promoters50/4769153
aaataaata

SEQ ID NO: 190492 - DNA, 9 bp, Unknown
  misc_feature (1)..( 9): Result.005 file - promoters50/4769153
aaataaata

SEQ ID NO: 190493 - DNA, 9 bp, Unknown
  misc_feature (1)..( 9): Result.005 file - promoters50/4769153
aaagaaaat

SEQ ID NO: 190494 - DNA, 9 bp, Unknown
  misc_feature (1)..( 9): Result.005 file - promoters50/4769153
taataaagc

SEQ ID NO: 190495 - DNA, 9 bp, Unknown
  misc_feature (1)..( 9): Result.005 file - promoters50/4769153
aaacaaaac

SEQ ID NO: 190496 - DNA, 10 bp, Unknown
  misc_feature (1)..( 10): Result.005 file - promoters50/4769153
taaacatatt

SEQ ID NO: 190497 - DNA, 10 bp, Unknown
  misc_feature (1)..( 10): Result.005 file - promoters50/4769153
actacatatt

SEQ ID NO: 190498 - DNA, 10 bp, Unknown
  misc_feature (1)..( 10): Result.005 file - promoters50/4769153
caaaaataag

SEQ ID NO: 190499 - DNA, 10 bp, Unknown
  misc_feature (1)..( 10): Result.005 file - promoters50/4769153
aaatcatatt

SEQ ID NO: 190500 - DNA, 10 bp, Unknown
  misc_feature (1)..( 10): Result.005 file - promoters50/4769153
caaaaaacga

SEQ ID NO: 190501 - DNA, 10 bp, Unknown
  misc_feature (1)..( 10): Result.005 file - promoters50/4769153
caaatatatg

SEQ ID NO: 190502 - DNA, 15 bp, Unknown
  misc_feature (1)..( 15): Result.005 file - promoters50/4769169
cggaatcaaaacaaa

SEQ ID NO: 190503 - DNA, 15 bp, Unknown
  misc_feature (1)..( 15): Result.005 file - promoters50/4769169
tctaataaaaaaaca

SEQ ID NO: 190504 - DNA, 16 bp, Unknown
  misc_feature (1)..( 16): Result.005 file - promoters50/4769169
cgaaaagcaaaaccaa

SEQ ID NO: 190505 - DNA, 16 bp, Unknown
  misc_feature (1)..( 16): Result.005 file - promoters50/4769169
taacaaacaatacata

SEQ ID NO: 190506 - DNA, 16 bp, Unknown
  misc_feature (1)..( 16): Result.005 file - promoters50/4769169
tgatatacaaaaaaaa

SEQ ID NO: 190507 - DNA, 16 bp, Unknown
  misc_feature (1)..( 16): Result.005 file - promoters50/4769169
tctaatagaaaacgaa

SEQ ID NO: 190508 - DNA, 16 bp, Unknown
  misc_feature (1)..( 16): Result.005 file - promoters50/4769169
gacagccgaaaacact

SEQ ID NO: 190509 - DNA, 9 bp, Unknown
  misc_feature (1)..( 9): Result.005 file - promoters50/4769169
caaaacaaa

SEQ ID NO: 190510 - DNA, 9 bp, Unknown
  misc_feature (1)..( 9): Result.005 file - promoters50/4769169
aaaaacaac

SEQ ID NO: 190511 - DNA, 10 bp, Unknown
  misc_feature (1)..( 10): Result.005 file - promoters50/4769169
gaaaacgaat

SEQ ID NO: 190512 - DNA, 10 bp, Unknown
  misc_feature (1)..( 10): Result.005 file - promoters50/4769169
gaaaagcaaa

SEQ ID NO: 190513 - DNA, 10 bp, Unknown
  misc_feature (1)..( 10): Result.005 file - promoters50/4769169
acaaacaata

SEQ ID NO: 190514 - DNA, 10 bp, Unknown
  misc_feature (1)..( 10): Result.005 file - promoters50/4769169
caaaaaaaaa

SEQ ID NO: 190515 - DNA, 10 bp, Unknown
  misc_feature (1)..( 10): Result.005 file - promoters50/4769169
cgaaaacact

SEQ ID NO: 190516 - DNA, 11 bp, Unknown
  misc_feature (1)..( 11): Result.005 file - promoters50/4769169
aaaatttataa

SEQ ID NO: 190517 - DNA, 11 bp, Unknown
  misc_feature (1)..( 11): Result.005 file - promoters50/4769169
gaaagttaaat

SEQ ID NO: 190518 - DNA, 11 bp, Unknown
  misc_feature (1)..( 11): Result.005 file - promoters50/4769169
aaaattaacta

SEQ ID NO: 190519 - DNA, 12 bp, Unknown
  misc_feature (1)..( 12): Result.005 file - promoters50/4769169
aaatatttgtaa

SEQ ID NO: 190520 - DNA, 12 bp, Unknown
  misc_feature (1)..( 12): Result.005 file - promoters50/4769169
gaaaatatcgaa

SEQ ID NO: 190521 - DNA, 12 bp, Unknown
  misc_feature (1)..( 12): Result.005 file - promoters50/4769169
tttaagttaacc

SEQ ID NO: 190522 - DNA, 12 bp, Unknown
  misc_feature (1)..( 12): Result.005 file - promoters50/4769169
tctcgtttataa

SEQ ID NO: 190523 - DNA, 9 bp, Unknown
  misc_feature (1)..( 9): Result.005 file - promoters50/4769177
ctatgttcg

SEQ ID NO: 190524 - DNA, 9 bp, Unknown
  misc_feature (1)..( 9): Result.005 file - promoters50/4769177
aaatgatcg

SEQ ID NO: 190525 - DNA, 9 bp, Unknown
  misc_feature (1)..( 9): Result.005 file - promoters50/4769177
atatgttat

SEQ ID NO: 190526 - DNA, 9 bp, Unknown
  misc_feature (1)..( 9): Result.005 file - promoters50/4769177
ttattttca

SEQ ID NO: 190527 - DNA, 9 bp, Unknown
  misc_feature (1)..( 9): Result.005 file - promoters50/4769177
atattttta

SEQ ID NO: 190528 - DNA, 9 bp, Unknown
  misc_feature (1)..( 9): Result.005 file - promoters50/4769177
aaaagataa

SEQ ID NO: 190529 - DNA, 11 bp, Unknown
  misc_feature (1)..( 11): Result.005 file - promoters50/4769177
caatattttta

SEQ ID NO: 190530 - DNA, 11 bp, Unknown
  misc_feature (1)..( 11): Result.005 file - promoters50/4769177
gaatcttttaa

SEQ ID NO: 190531 - DNA, 11 bp, Unknown
  misc_feature (1)..( 11): Result.005 file - promoters50/4769177
caaaattactg

SEQ ID NO: 190532 - DNA, 11 bp, Unknown
  misc_feature (1)..( 11): Result.005 file - promoters50/4769177
aattattttca

SEQ ID NO: 190533 - DNA, 11 bp, Unknown
  misc_feature (1)..( 11): Result.005 file - promoters50/4769177
ttttatttcat

SEQ ID NO: 190534 - DNA, 11 bp, Unknown
  misc_feature (1)..( 11): Result.005 file - promoters50/4769177
tgttatcttca

SEQ ID NO: 190535 - DNA, 13 bp, Unknown
  misc_feature (1)..( 13): Result.005 file - promoters50/4769180
ttaaaatatttcg

SEQ ID NO: 190536 - DNA, 13 bp, Unknown
  misc_feature (1)..( 13): Result.005 file - promoters50/4769180
aaaaaacattcca

SEQ ID NO: 190537 - DNA, 13 bp, Unknown
  misc_feature (1)..( 13): Result.005 file - promoters50/4769180
agttaatattaag

SEQ ID NO: 190538 - DNA, 13 bp, Unknown
  misc_feature (1)..( 13): Result.005 file - promoters50/4769180
ttaaaatagtaga

SEQ ID NO: 190539 - DNA, 13 bp, Unknown
  misc_feature (1)..( 13): Result.005 file - promoters50/4769180
aaatcatatttat

SEQ ID NO: 190540 - DNA, 13 bp, Unknown
  misc_feature (1)..( 13): Result.005 file - promoters50/4769180
tatcaaaattaaa

SEQ ID NO: 190541 - DNA, 10 bp, Unknown
  misc_feature (1)..( 10): Result.005 file - promoters50/4769180
gaaattaatc

SEQ ID NO: 190542 - DNA, 10 bp, Unknown
  misc_feature (1)..( 10): Result.005 file - promoters50/4769180
ttgatttatc

SEQ ID NO: 190543 - DNA, 10 bp, Unknown
  misc_feature (1)..( 10): Result.005 file - promoters50/4769180
aaaatcaatc

SEQ ID NO: 190544 - DNA, 10 bp, Unknown
  misc_feature (1)..( 10): Result.005 file - promoters50/4769180
tttattcatc

SEQ ID NO: 190545 - DNA, 10 bp, Unknown
  misc_feature (1)..( 10): Result.005 file - promoters50/4769180
gaaattaata

SEQ ID NO: 190546 - DNA, 10 bp, Unknown
  misc_feature (1)..( 10): Result.005 file - promoters50/4769180
tagatttacc

SEQ ID NO: 190547 - DNA, 12 bp, Unknown
  misc_feature (1)..( 12): Result.005 file - promoters50/4769180
tgaataaccaaa

SEQ ID NO: 190548 - DNA, 12 bp, Unknown
  misc_feature (1)..( 12): Result.005 file - promoters50/4769180
agaataatattt

SEQ ID NO: 190549 - DNA, 12 bp, Unknown
  misc_feature (1)..( 12): Result.005 file - promoters50/4769180
ttaattaccaaa

SEQ ID NO: 190550 - DNA, 12 bp, Unknown
  misc_feature (1)..( 12): Result.005 file - promoters50/4769180
aaaataaacaat

SEQ ID NO: 190551 - DNA, 12 bp, Unknown
  misc_feature (1)..( 12): Result.005 file - promoters50/4769180
ttaattaatact

SEQ ID NO: 190552 - DNA, 12 bp, Unknown
  misc_feature (1)..( 12): Result.005 file - promoters50/4769180
caaattacatac

SEQ ID NO: 190553 - DNA, 11 bp, Unknown
  misc_feature (1)..( 11): Result.005 file - promoters50/4769184
ttaaaattcaa

SEQ ID NO: 190554 - DNA, 11 bp, Unknown
  misc_feature (1)..( 11): Result.005 file - promoters50/4769184
ccaaaatccaa

SEQ ID NO: 190555 - DNA, 11 bp, Unknown
  misc_feature (1)..( 11): Result.005 file - promoters50/4769184
cacaaagtcaa

SEQ ID NO: 190556 - DNA, 11 bp, Unknown
  misc_feature (1)..( 11): Result.005 file - promoters50/4769184
ttataatattt

SEQ ID NO: 190557 - DNA, 11 bp, Unknown
  misc_feature (1)..( 11): Result.005 file - promoters50/4769184
ttaaaatctct

SEQ ID NO: 190558 - DNA, 9 bp, Unknown
  misc_feature (1)..( 9): Result.005 file - promoters50/4769186
cgaaagaat

SEQ ID NO: 190559 - DNA, 9 bp, Unknown
  misc_feature (1)..( 9): Result.005 file - promoters50/4769186
gaaaagaaa

SEQ ID NO: 190560 - DNA, 10 bp, Unknown
  misc_feature (1)..( 10): Result.005 file - promoters50/4769186
ggaaatgaaa

SEQ ID NO: 190561 - DNA, 7 bp, Unknown
  misc_feature (1)..( 7): Result.005 file - promoters50/4769186
aaaatat

SEQ ID NO: 190562 - DNA, 7 bp, Unknown
  misc_feature (1)..( 7): Result.005 file - promoters50/4769186
aaaataa

SEQ ID NO: 190563 - DNA, 7 bp, Unknown
  misc_feature (1)..( 7): Result.005 file - promoters50/4769186
gaaatat

SEQ ID NO: 190564 - DNA, 10 bp, Unknown
  misc_feature (1)..( 10): Result.005 file - promoters50/4769186
atgtagaaaa

SEQ ID NO: 190565 - DNA, 10 bp, Unknown
  misc_feature (1)..( 10): Result.005 file - promoters50/4769186
atgaagaatt

SEQ ID NO: 190566 - DNA, 10 bp, Unknown
  misc_feature (1)..( 10): Result.005 file - promoters50/4769186
tagtataaaa

SEQ ID NO: 190567 - DNA, 8 bp, Unknown
  misc_feature (1)..( 8): Result.005 file - promoters50/4769186
ggttgtgt

SEQ ID NO: 190568 - DNA, 8 bp, Unknown
  misc_feature (1)..( 8): Result.005 file - promoters50/4769186
ggttttgt

SEQ ID NO: 190569 - DNA, 8 bp, Unknown
  misc_feature (1)..( 8): Result.005 file - promoters50/4769186
ggttttta

SEQ ID NO: 190570 - DNA, 13 bp, Unknown
  misc_feature (1)..( 13): Result.005 file - promoters50/4769201
aacaaatggtgat

SEQ ID NO: 190571 - DNA, 13 bp, Unknown
  misc_feature (1)..( 13): Result.005 file - promoters50/4769201
aacaaattattaa

SEQ ID NO: 190572 - DNA, 13 bp, Unknown
  misc_feature (1)..( 13): Result.005 file - promoters50/4769201
gacacattagtaa

SEQ ID NO: 190573 - DNA, 17 bp, Unknown
  misc_feature (1)..( 17): Result.005 file - promoters50/4769209
agattctttcacaaata

SEQ ID NO: 190574 - DNA, 17 bp, Unknown
  misc_feature (1)..( 17): Result.005 file - promoters50/4769209
tatttccttctcaattt

SEQ ID NO: 190575 - DNA, 17 bp, Unknown
  misc_feature (1)..( 17): Result.005 file - promoters50/4769209
tattttcttctcagttt

SEQ ID NO: 190576 - DNA, 10 bp, Unknown
  misc_feature (1)..( 10): Result.005 file - promoters50/4769217
tttgtttttg

SEQ ID NO: 190577 - DNA, 10 bp, Unknown
  misc_feature (1)..( 10): Result.005 file - promoters50/4769217
tttcttttgt

SEQ ID NO: 190578 - DNA, 11 bp, Unknown
  misc_feature (1)..( 11): Result.005 file - promoters50/4769217
tgtgtatttga

SEQ ID NO: 190579 - DNA, 11 bp, Unknown
  misc_feature (1)..( 11): Result.005 file - promoters50/4769217
catccctttct

SEQ ID NO: 190580 - DNA, 11 bp, Unknown
  misc_feature (1)..( 11): Result.005 file - promoters50/4769217
attacttgcac

SEQ ID NO: 190581 - DNA, 7 bp, Unknown
  misc_feature (1)..( 7): Result.005 file - promoters50/4769217
tttttgt

SEQ ID NO: 190582 - DNA, 7 bp, Unknown
  misc_feature (1)..( 7): Result.005 file - promoters50/4769217
cttttgt

SEQ ID NO: 190583 - DNA, 8 bp, Unknown
  misc_feature (1)..( 8): Result.005 file - promoters50/4769217
atttatgt

SEQ ID NO: 190584 - DNA, 8 bp, Unknown
  misc_feature (1)..( 8): Result.005 file - promoters50/4769217
ctttctct

SEQ ID NO: 190585 - DNA, 8 bp, Unknown
  misc_feature (1)..( 8): Result.005 file - promoters50/4769217
atttatta

SEQ ID NO: 190586 - DNA, 7 bp, Unknown
  misc_feature (1)..( 7): Result.005 file - promoters50/4769217
gttaatg

SEQ ID NO: 190587 - DNA, 7 bp, Unknown
  misc_feature (1)..( 7): Result.005 file - promoters50/4769217
gttaata

SEQ ID NO: 190588 - DNA, 7 bp, Unknown
  misc_feature (1)..( 7): Result.005 file - promoters50/4769217
tttaata

SEQ ID NO: 190589 - DNA, 7 bp, Unknown
  misc_feature (1)..( 7): Result.005 file - promoters50/4769217
ttttata

SEQ ID NO: 190590 - DNA, 12 bp, Unknown
  misc_feature (1)..( 12): Result.005 file - promoters50/4769217
tcggtcagttta

SEQ ID NO: 190591 - DNA, 12 bp, Unknown
  misc_feature (1)..( 12): Result.005 file - promoters50/4769217
tttgtcattttc

SEQ ID NO: 190592 - DNA, 12 bp, Unknown
  misc_feature (1)..( 12): Result.005 file - promoters50/4769217
accctcatttta

SEQ ID NO: 190593 - DNA, 12 bp, Unknown
  misc_feature (1)..( 12): Result.005 file - promoters50/4769217
tttgacattatg

SEQ ID NO: 190594 - DNA, 9 bp, Unknown
  misc_feature (1)..( 9): Result.005 file - promoters50/4769217
atagttttt

SEQ ID NO: 190595 - DNA, 9 bp, Unknown
  misc_feature (1)..( 9): Result.005 file - promoters50/4769217
ataatttaa

SEQ ID NO: 190596 - DNA, 9 bp, Unknown
  misc_feature (1)..( 9): Result.005 file - promoters50/4769217
acaatttaa

SEQ ID NO: 190597 - DNA, 9 bp, Unknown
  misc_feature (1)..( 9): Result.005 file - promoters50/4769217
agaatttaa

SEQ ID NO: 190598 - DNA, 8 bp, Unknown
  misc_feature (1)..( 8): Result.005 file - promoters50/4769217
tttttaaa

SEQ ID NO: 190599 - DNA, 8 bp, Unknown
  misc_feature (1)..( 8): Result.005 file - promoters50/4769217
aatttaaa

SEQ ID NO: 190600 - DNA, 8 bp, Unknown
  misc_feature (1)..( 8): Result.005 file - promoters50/4769217
aatttaag

SEQ ID NO: 190601 - DNA, 8 bp, Unknown
  misc_feature (1)..( 8): Result.005 file - promoters50/4769217
tatttaac

SEQ ID NO: 190602 - DNA, 9 bp, Unknown
  misc_feature (1)..( 9): Result.005 file - promoters50/4769217
atattataa

SEQ ID NO: 190603 - DNA, 9 bp, Unknown
  misc_feature (1)..( 9): Result.005 file - promoters50/4769217
atattaaaa

SEQ ID NO: 190604 - DNA, 9 bp, Unknown
  misc_feature (1)..( 9): Result.005 file - promoters50/4769217
atactaaaa

SEQ ID NO: 190605 - DNA, 9 bp, Unknown
  misc_feature (1)..( 9): Result.005 file - promoters50/4769217
cagctaaaa

SEQ ID NO: 190606 - DNA, 9 bp, Unknown
  misc_feature (1)..( 9): Result.005 file - promoters50/4769221
taaaaatta

SEQ ID NO: 190607 - DNA, 9 bp, Unknown
  misc_feature (1)..( 9): Result.005 file - promoters50/4769221
ccaaattta

SEQ ID NO: 190608 - DNA, 9 bp, Unknown
  misc_feature (1)..( 9): Result.005 file - promoters50/4769221
taaaaatat

SEQ ID NO: 190609 - DNA, 9 bp, Unknown
  misc_feature (1)..( 9): Result.005 file - promoters50/4769257
tgaaacaaa

SEQ ID NO: 190610 - DNA, 9 bp, Unknown
  misc_feature (1)..( 9): Result.005 file - promoters50/4769257
tgaatcaat

SEQ ID NO: 190611 - DNA, 9 bp, Unknown
  misc_feature (1)..( 9): Result.005 file - promoters50/4769257
ataaacaaa

SEQ ID NO: 190612 - DNA, 9 bp, Unknown
  misc_feature (1)..( 9): Result.005 file - promoters50/4769257
ctaatcaag

SEQ ID NO: 190613 - DNA, 9 bp, Unknown
  misc_feature (1)..( 9): Result.005 file - promoters50/4769257
aatatcaat

SEQ ID NO: 190614 - DNA, 9 bp, Unknown
  misc_feature (1)..( 9): Result.005 file - promoters50/4769257
cttataaat

SEQ ID NO: 190615 - DNA, 10 bp, Unknown
  misc_feature (1)..( 10): Result.005 file - promoters50/4769257
ttttgttaaa

SEQ ID NO: 190616 - DNA, 10 bp, Unknown
  misc_feature (1)..( 10): Result.005 file - promoters50/4769257
ttttattaat

SEQ ID NO: 190617 - DNA, 10 bp, Unknown
  misc_feature (1)..( 10): Result.005 file - promoters50/4769257
tttagtttct

SEQ ID NO: 190618 - DNA, 10 bp, Unknown
  misc_feature (1)..( 10): Result.005 file - promoters50/4769257
ctttcttgga

SEQ ID NO: 190619 - DNA, 10 bp, Unknown
  misc_feature (1)..( 10): Result.005 file - promoters50/4769257
ctatataaat

SEQ ID NO: 190620 - DNA, 10 bp, Unknown
  misc_feature (1)..( 10): Result.005 file - promoters50/4769257
taatcttaac

SEQ ID NO: 190621 - DNA, 10 bp, Unknown
  misc_feature (1)..( 10): Result.005 file - promoters50/4769257
aaatataaat

SEQ ID NO: 190622 - DNA, 13 bp, Unknown
  misc_feature (1)..( 13): Result.005 file - promoters50/4769257
gaaaagaaagaaa

SEQ ID NO: 190623 - DNA, 13 bp, Unknown
  misc_feature (1)..( 13): Result.005 file - promoters50/4769257
tcaaaaaaacgag

SEQ ID NO: 190624 - DNA, 13 bp, Unknown
  misc_feature (1)..( 13): Result.005 file - promoters50/4769257
aaaaacaaaacaa

SEQ ID NO: 190625 - DNA, 13 bp, Unknown
  misc_feature (1)..( 13): Result.005 file - promoters50/4769257
gacaacaaacgaa

SEQ ID NO: 190626 - DNA, 13 bp, Unknown
  misc_feature (1)..( 13): Result.005 file - promoters50/4769257
tcataaatacgta

SEQ ID NO: 190627 - DNA, 13 bp, Unknown
  misc_feature (1)..( 13): Result.005 file - promoters50/4769257
aattaaatagtta

SEQ ID NO: 190628 - DNA, 13 bp, Unknown
  misc_feature (1)..( 13): Result.005 file - promoters50/4769257
actctcaaacgcg

SEQ ID NO: 190629 - DNA, 9 bp, Unknown
  misc_feature (1)..( 9): Result.005 file - promoters50/4769257
acaaaattg

SEQ ID NO: 190630 - DNA, 9 bp, Unknown
  misc_feature (1)..( 9): Result.005 file - promoters50/4769257
tcaagattt

SEQ ID NO: 190631 - DNA, 9 bp, Unknown
  misc_feature (1)..( 9): Result.005 file - promoters50/4769257
tataaattg

SEQ ID NO: 190632 - DNA, 9 bp, Unknown
  misc_feature (1)..( 9): Result.005 file - promoters50/4769257
ttaaaattt

SEQ ID NO: 190633 - DNA, 9 bp, Unknown
  misc_feature (1)..( 9): Result.005 file - promoters50/4769257
aaaaaattc

SEQ ID NO: 190634 - DNA, 9 bp, Unknown
  misc_feature (1)..( 9): Result.005 file - promoters50/4769257
ttaaaataa

SEQ ID NO: 190635 - DNA, 9 bp, Unknown
  misc_feature (1)..( 9): Result.005 file - promoters50/4769257
ctaaaatct

SEQ ID NO: 190636 - DNA, 8 bp, Unknown
  misc_feature (1)..( 8): Result.005 file - promoters50/4769257
tttacaaa

SEQ ID NO: 190637 - DNA, 8 bp, Unknown
  misc_feature (1)..( 8): Result.005 file - promoters50/4769257
aatacaaa

SEQ ID NO: 190638 - DNA, 8 bp, Unknown
  misc_feature (1)..( 8): Result.005 file - promoters50/4769257
aatataaa

SEQ ID NO: 190639 - DNA, 8 bp, Unknown
  misc_feature (1)..( 8): Result.005 file - promoters50/4769257
tatataaa

SEQ ID NO: 190640 - DNA, 8 bp, Unknown
  misc_feature (1)..( 8): Result.005 file - promoters50/4769257
aattcaat

SEQ ID NO: 190641 - DNA, 8 bp, Unknown
  misc_feature (1)..( 8): Result.005 file - promoters50/4769257
aatataat

SEQ ID NO: 190642 - DNA, 11 bp, Unknown
  misc_feature (1)..( 11): Result.005 file - promoters50/4769260
atgatttgttt

SEQ ID NO: 190643 - DNA, 11 bp, Unknown
  misc_feature (1)..( 11): Result.005 file - promoters50/4769260
gtgattttttt

SEQ ID NO: 190644 - DNA, 11 bp, Unknown
  misc_feature (1)..( 11): Result.005 file - promoters50/4769260
aagatttgagt

SEQ ID NO: 190645 - DNA, 11 bp, Unknown
  misc_feature (1)..( 11): Result.005 file - promoters50/4769260
aatttttgttg

SEQ ID NO: 190646 - DNA, 11 bp, Unknown
  misc_feature (1)..( 11): Result.005 file - promoters50/4769260
attatttttat

SEQ ID NO: 190647 - DNA, 11 bp, Unknown
  misc_feature (1)..( 11): Result.005 file - promoters50/4769260
attatttacta

SEQ ID NO: 190648 - DNA, 9 bp, Unknown
  misc_feature (1)..( 9): Result.005 file - promoters50/4769260
ataaaaaga

SEQ ID NO: 190649 - DNA, 9 bp, Unknown
  misc_feature (1)..( 9): Result.005 file - promoters50/4769260
ttaaaaact

SEQ ID NO: 190650 - DNA, 9 bp, Unknown
  misc_feature (1)..( 9): Result.005 file - promoters50/4769260
cgaaaaagc

SEQ ID NO: 190651 - DNA, 9 bp, Unknown
  misc_feature (1)..( 9): Result.005 file - promoters50/4769260
ataaaaaca

SEQ ID NO: 190652 - DNA, 9 bp, Unknown
  misc_feature (1)..( 9): Result.005 file - promoters50/4769260
ataataacc

SEQ ID NO: 190653 - DNA, 9 bp, Unknown
  misc_feature (1)..( 9): Result.005 file - promoters50/4769260
gaaaaaact

SEQ ID NO: 190654 - DNA, 7 bp, Unknown
  misc_feature (1)..( 7): Result.005 file - promoters50/4769276
gaacatt

SEQ ID NO: 190655 - DNA, 7 bp, Unknown
  misc_feature (1)..( 7): Result.005 file - promoters50/4769276
gaacatg

SEQ ID NO: 190656 - DNA, 7 bp, Unknown
  misc_feature (1)..( 7): Result.005 file - promoters50/4769276
gaacata

SEQ ID NO: 190657 - DNA, 7 bp, Unknown
  misc_feature (1)..( 7): Result.005 file - promoters50/4769276
gaaaatt

SEQ ID NO: 190658 - DNA, 11 bp, Unknown
  misc_feature (1)..( 11): Result.005 file - promoters50/4769296
acttcttcacc

SEQ ID NO: 190659 - DNA, 11 bp, Unknown
  misc_feature (1)..( 11): Result.005 file - promoters50/4769296
acttcctcaat

SEQ ID NO: 190660 - DNA, 11 bp, Unknown
  misc_feature (1)..( 11): Result.005 file - promoters50/4769296
tactcttcacc

SEQ ID NO: 190661 - DNA, 10 bp, Unknown
  misc_feature (1)..( 10): Result.005 file - promoters50/4769296
aaaagaataa

SEQ ID NO: 190662 - DNA, 10 bp, Unknown
  misc_feature (1)..( 10): Result.005 file - promoters50/4769296
aaaagaaaca

SEQ ID NO: 190663 - DNA, 10 bp, Unknown
  misc_feature (1)..( 10): Result.005 file - promoters50/4769296
aaaaaaaaca

SEQ ID NO: 190664 - DNA, 10 bp, Unknown
  misc_feature (1)..( 10): Result.005 file - promoters50/4769296
taacatataa

SEQ ID NO: 190665 - DNA, 10 bp, Unknown
  misc_feature (1)..( 10): Result.005 file - promoters50/4769296
ctctatataa

SEQ ID NO: 190666 - DNA, 10 bp, Unknown
  misc_feature (1)..( 10): Result.005 file - promoters50/4769296
ctctctatat

SEQ ID NO: 190667 - DNA, 16 bp, Unknown
  misc_feature (1)..( 16): Result.005 file - promoters50/4769301
ggtcttacaatttttt

SEQ ID NO: 190668 - DNA, 16 bp, Unknown
  misc_feature (1)..( 16): Result.005 file - promoters50/4769301
agaaatacaattttgt

SEQ ID NO: 190669 - DNA, 16 bp, Unknown
  misc_feature (1)..( 16): Result.005 file - promoters50/4769301
ctcacatttatttttg

SEQ ID NO: 190670 - DNA, 16 bp, Unknown
  misc_feature (1)..( 16): Result.005 file - promoters50/4769301
agaactactattcgtg

SEQ ID NO: 190671 - DNA, 16 bp, Unknown
  misc_feature (1)..( 16): Result.005 file - promoters50/4769301
aagtcagctatttgtg

SEQ ID NO: 190672 - DNA, 8 bp, Unknown
  misc_feature (1)..( 8): Result.005 file - promoters50/4769301
acttttgg

SEQ ID NO: 190673 - DNA, 8 bp, Unknown
  misc_feature (1)..( 8): Result.005 file - promoters50/4769301
atttttgg

SEQ ID NO: 190674 - DNA, 8 bp, Unknown
  misc_feature (1)..( 8): Result.005 file - promoters50/4769301
gtttttgt

SEQ ID NO: 190675 - DNA, 8 bp, Unknown
  misc_feature (1)..( 8): Result.005 file - promoters50/4769301
attgttgt

SEQ ID NO: 190676 - DNA, 10 bp, Unknown
  misc_feature (1)..( 10): Result.005 file - promoters50/4769301
ttttaaaaga

SEQ ID NO: 190677 - DNA, 10 bp, Unknown
  misc_feature (1)..( 10): Result.005 file - promoters50/4769301
tttcaaaaaa

SEQ ID NO: 190678 - DNA, 10 bp, Unknown
  misc_feature (1)..( 10): Result.005 file - promoters50/4769301
ttgcaaaaaa

SEQ ID NO: 190679 - DNA, 10 bp, Unknown
  misc_feature (1)..( 10): Result.005 file - promoters50/4769301
cttcacaaac

SEQ ID NO: 190680 - DNA, 9 bp, Unknown
  misc_feature (1)..( 9): Result.005 file - promoters50/4769308
tgttttggt

SEQ ID NO: 190681 - DNA, 9 bp, Unknown
  misc_feature (1)..( 9): Result.005 file - promoters50/4769308
atgtttggt

SEQ ID NO: 190682 - DNA, 9 bp, Unknown
  misc_feature (1)..( 9): Result.005 file - promoters50/4769308
atgtttgga

SEQ ID NO: 190683 - DNA, 11 bp, Unknown
  misc_feature (1)..( 11): Result.005 file - promoters50/4769312
tctatataaac

SEQ ID NO: 190684 - DNA, 11 bp, Unknown
  misc_feature (1)..( 11): Result.005 file - promoters50/4769312
tctatataata

SEQ ID NO: 190685 - DNA, 11 bp, Unknown
  misc_feature (1)..( 11): Result.005 file - promoters50/4769312
attatttaaac

SEQ ID NO: 190686 - DNA, 11 bp, Unknown
  misc_feature (1)..( 11): Result.005 file - promoters50/4769312
tatatataccc

SEQ ID NO: 190687 - DNA, 11 bp, Unknown
  misc_feature (1)..( 11): Result.005 file - promoters50/4769312
tatatataaag

SEQ ID NO: 190688 - DNA, 11 bp, Unknown
  misc_feature (1)..( 11): Result.005 file - promoters50/4769312
ccaatataatc

SEQ ID NO: 190689 - DNA, 11 bp, Unknown
  misc_feature (1)..( 11): Result.005 file - promoters50/4769312
cctaaataaat

SEQ ID NO: 190690 - DNA, 12 bp, Unknown
  misc_feature (1)..( 12): Result.005 file - promoters50/4769312
acaataaagtag

SEQ ID NO: 190691 - DNA, 12 bp, Unknown
  misc_feature (1)..( 12): Result.005 file - promoters50/4769312
tcaacaaaatag

SEQ ID NO: 190692 - DNA, 12 bp, Unknown
  misc_feature (1)..( 12): Result.005 file - promoters50/4769312
acaaaaaataga

SEQ ID NO: 190693 - DNA, 13 bp, Unknown
  misc_feature (1)..( 13): Result.005 file - promoters50/4769312
aaccataaagaga

SEQ ID NO: 190694 - DNA, 12 bp, Unknown
  misc_feature (1)..( 12): Result.005 file - promoters50/4769312
gaaaaaaagaaa

SEQ ID NO: 190695 - DNA, 13 bp, Unknown
  misc_feature (1)..( 13): Result.005 file - promoters50/4769312
ccaagtaaaaacc

SEQ ID NO: 190696 - DNA, 13 bp, Unknown
  misc_feature (1)..( 13): Result.005 file - promoters50/4769312
aaaaagaaaaaaa

SEQ ID NO: 190697 - DNA, 13 bp, Unknown
  misc_feature (1)..( 13): Result.005 file - promoters50/4769312
aaatagataaatt

SEQ ID NO: 190698 - DNA, 13 bp, Unknown
  misc_feature (1)..( 13): Result.005 file - promoters50/4769312
aattagaaaatgc

SEQ ID NO: 190699 - DNA, 14 bp, Unknown
  misc_feature (1)..( 14): Result.005 file - promoters50/4769312
tccaagtaaaaacc

SEQ ID NO: 190700 - DNA, 14 bp, Unknown
  misc_feature (1)..( 14): Result.005 file - promoters50/4769312
aaaccataaagaga

SEQ ID NO: 190701 - DNA, 14 bp, Unknown
  misc_feature (1)..( 14): Result.005 file - promoters50/4769312
caacaaaatagatt

SEQ ID NO: 190702 - DNA, 14 bp, Unknown
  misc_feature (1)..( 14): Result.005 file - promoters50/4769320
tactaatactcaaa

SEQ ID NO: 190703 - DNA, 14 bp, Unknown
  misc_feature (1)..( 14): Result.005 file - promoters50/4769320
atttaatagtcatt

SEQ ID NO: 190704 - DNA, 14 bp, Unknown
  misc_feature (1)..( 14): Result.005 file - promoters50/4769320
atttgatagtgatt

SEQ ID NO: 190705 - DNA, 8 bp, Unknown
  misc_feature (1)..( 8): Result.005 file - promoters50/4769320
aattttgg

SEQ ID NO: 190706 - DNA, 8 bp, Unknown
  misc_feature (1)..( 8): Result.005 file - promoters50/4769320
aatattga

SEQ ID NO: 190707 - DNA, 8 bp, Unknown
  misc_feature (1)..( 8): Result.005 file - promoters50/4769320
tgttttgg

SEQ ID NO: 190708 - DNA, 9 bp, Unknown
  misc_feature (1)..( 9): Result.005 file - promoters50/4769320
tatttttgt

SEQ ID NO: 190709 - DNA, 9 bp, Unknown
  misc_feature (1)..( 9): Result.005 file - promoters50/4769320
tatatttga

SEQ ID NO: 190710 - DNA, 9 bp, Unknown
  misc_feature (1)..( 9): Result.005 file - promoters50/4769320
tatatgatt

SEQ ID NO: 190711 - DNA, 8 bp, Unknown
  misc_feature (1)..( 8): Result.005 file - promoters50/4769320
attacaat

SEQ ID NO: 190712 - DNA, 8 bp, Unknown
  misc_feature (1)..( 8): Result.005 file - promoters50/4769320
attacaca

SEQ ID NO: 190713 - DNA, 8 bp, Unknown
  misc_feature (1)..( 8): Result.005 file - promoters50/4769320
cttaaaca

SEQ ID NO: 190714 - DNA, 8 bp, Unknown
  misc_feature (1)..( 8): Result.005 file - promoters50/4769320
tattgttt

SEQ ID NO: 190715 - DNA, 8 bp, Unknown
  misc_feature (1)..( 8): Result.005 file - promoters50/4769320
tatttttt

SEQ ID NO: 190716 - DNA, 8 bp, Unknown
  misc_feature (1)..( 8): Result.005 file - promoters50/4769320
aatttttg

SEQ ID NO: 190717 - DNA, 12 bp, Unknown
  misc_feature (1)..( 12): Result.005 file - promoters50/4769328
aagaaatttgct

SEQ ID NO: 190718 - DNA, 12 bp, Unknown
  misc_feature (1)..( 12): Result.005 file - promoters50/4769328
tatgaatctgct

SEQ ID NO: 190719 - DNA, 12 bp, Unknown
  misc_feature (1)..( 12): Result.005 file - promoters50/4769328
gtcaaatttgtc

SEQ ID NO: 190720 - DNA, 12 bp, Unknown
  misc_feature (1)..( 12): Result.005 file - promoters50/4769328
aagaaaattgac

SEQ ID NO: 190721 - DNA, 12 bp, Unknown
  misc_feature (1)..( 12): Result.005 file - promoters50/4769328
taacaatttttt

SEQ ID NO: 190722 - DNA, 12 bp, Unknown
  misc_feature (1)..( 12): Result.005 file - promoters50/4769328
tcccaattttgc

SEQ ID NO: 190723 - DNA, 13 bp, Unknown
  misc_feature (1)..( 13): Result.005 file - promoters50/4769328
gaccaattttcat

SEQ ID NO: 190724 - DNA, 13 bp, Unknown
  misc_feature (1)..( 13): Result.005 file - promoters50/4769328
tttgaattttgcc

SEQ ID NO: 190725 - DNA, 13 bp, Unknown
  misc_feature (1)..( 13): Result.005 file - promoters50/4769328
tacatattatcat

SEQ ID NO: 190726 - DNA, 13 bp, Unknown
  misc_feature (1)..( 13): Result.005 file - promoters50/4769328
aatattttatcac

SEQ ID NO: 190727 - DNA, 13 bp, Unknown
  misc_feature (1)..( 13): Result.005 file - promoters50/4769328
attggatttaaca

SEQ ID NO: 190728 - DNA, 13 bp, Unknown
  misc_feature (1)..( 13): Result.005 file - promoters50/4769328
catgaatttaaat

SEQ ID NO: 190729 - DNA, 13 bp, Unknown
  misc_feature (1)..( 13): Result.005 file - promoters50/4769328
agaaaatttgatg

SEQ ID NO: 190730 - DNA, 12 bp, Unknown
  misc_feature (1)..( 12): Result.005 file - promoters50/4769366
tataaacatttt

SEQ ID NO: 190731 - DNA, 12 bp, Unknown
  misc_feature (1)..( 12): Result.005 file - promoters50/4769366
actaaaaatttt

SEQ ID NO: 190732 - DNA, 12 bp, Unknown
  misc_feature (1)..( 12): Result.005 file - promoters50/4769366
actacaaattcc

SEQ ID NO: 190733 - DNA, 9 bp, Unknown
  misc_feature (1)..( 9): Result.005 file - promoters50/4769366
acaactact

SEQ ID NO: 190734 - DNA, 9 bp, Unknown
  misc_feature (1)..( 9): Result.005 file - promoters50/4769366
acaactaag

SEQ ID NO: 190735 - DNA, 9 bp, Unknown
  misc_feature (1)..( 9): Result.005 file - promoters50/4769366
aaaactaag

SEQ ID NO: 190736 - DNA, 14 bp, Unknown
  misc_feature (1)..( 14): Result.005 file - promoters50/4769366
ttcttatttaaacg

SEQ ID NO: 190737 - DNA, 14 bp, Unknown
  misc_feature (1)..( 14): Result.005 file - promoters50/4769366
ttcctattaaaacc

SEQ ID NO: 190738 - DNA, 14 bp, Unknown
  misc_feature (1)..( 14): Result.005 file - promoters50/4769366
tctgttataaaacc

SEQ ID NO: 190739 - DNA, 9 bp, Unknown
  misc_feature (1)..( 9): Result.005 file - promoters50/4769384
ttatttatt

SEQ ID NO: 190740 - DNA, 9 bp, Unknown
  misc_feature (1)..( 9): Result.005 file - promoters50/4769384
gtatatata

SEQ ID NO: 190741 - DNA, 9 bp, Unknown
  misc_feature (1)..( 9): Result.005 file - promoters50/4769384
gtatataac

SEQ ID NO: 190742 - DNA, 9 bp, Unknown
  misc_feature (1)..( 9): Result.005 file - promoters50/4769384
gtataaata

SEQ ID NO: 190743 - DNA, 9 bp, Unknown
  misc_feature (1)..( 9): Result.005 file - promoters50/4769407
atattttca

SEQ ID NO: 190744 - DNA, 9 bp, Unknown
  misc_feature (1)..( 9): Result.005 file - promoters50/4769407
acattttca

SEQ ID NO: 190745 - DNA, 9 bp, Unknown
  misc_feature (1)..( 9): Result.005 file - promoters50/4769407
atattttta

SEQ ID NO: 190746 - DNA, 12 bp, Unknown
  misc_feature (1)..( 12): Result.005 file - promoters50/4769411
aagaaagtgttt

SEQ ID NO: 190747 - DNA, 12 bp, Unknown
  misc_feature (1)..( 12): Result.005 file - promoters50/4769411
attaaattgtga

SEQ ID NO: 190748 - DNA, 12 bp, Unknown
  misc_feature (1)..( 12): Result.005 file - promoters50/4769411
atagaagtcttt

SEQ ID NO: 190749 - DNA, 12 bp, Unknown
  misc_feature (1)..( 12): Result.005 file - promoters50/4769411
attaaattaatt

SEQ ID NO: 190750 - DNA, 12 bp, Unknown
  misc_feature (1)..( 12): Result.005 file - promoters50/4769411
gagaaattgagg

SEQ ID NO: 190751 - DNA, 12 bp, Unknown
  misc_feature (1)..( 12): Result.005 file - promoters50/4769411
gaaaaattaaca

SEQ ID NO: 190752 - DNA, 12 bp, Unknown
  misc_feature (1)..( 12): Result.005 file - promoters50/4769411
ttttaaaataaa

SEQ ID NO: 190753 - DNA, 12 bp, Unknown
  misc_feature (1)..( 12): Result.005 file - promoters50/4769411
cattaaattaat

SEQ ID NO: 190754 - DNA, 12 bp, Unknown
  misc_feature (1)..( 12): Result.005 file - promoters50/4769411
ttttaaagaacc

SEQ ID NO: 190755 - DNA, 12 bp, Unknown
  misc_feature (1)..( 12): Result.005 file - promoters50/4769411
tgtaaaaagaaa

SEQ ID NO: 190756 - DNA, 12 bp, Unknown
  misc_feature (1)..( 12): Result.005 file - promoters50/4769411
tgtattattaat

SEQ ID NO: 190757 - DNA, 12 bp, Unknown
  misc_feature (1)..( 12): Result.005 file - promoters50/4769411
tatgcaatcaat

SEQ ID NO: 190758 - DNA, 7 bp, Unknown
  misc_feature (1)..( 7): Result.005 file - promoters50/4769413
tttattt

SEQ ID NO: 190759 - DNA, 7 bp, Unknown
  misc_feature (1)..( 7): Result.005 file - promoters50/4769413
tttgttt

SEQ ID NO: 190760 - DNA, 7 bp, Unknown
  misc_feature (1)..( 7): Result.005 file - promoters50/4769413
tttgtta

SEQ ID NO: 190761 - DNA, 12 bp, Unknown
  misc_feature (1)..( 12): Result.005 file - promoters50/4769420
ccaaattatttt

SEQ ID NO: 190762 - DNA, 12 bp, Unknown
  misc_feature (1)..( 12): Result.005 file - promoters50/4769420
aaaaagtatttt

SEQ ID NO: 190763 - DNA, 12 bp, Unknown
  misc_feature (1)..( 12): Result.005 file - promoters50/4769420
aaaaagtaaaca

SEQ ID NO: 190764 - DNA, 9 bp, Unknown
  misc_feature (1)..( 9): Result.005 file - promoters50/4769741
aaaaatgaa

SEQ ID NO: 190765 - DNA, 9 bp, Unknown
  misc_feature (1)..( 9): Result.005 file - promoters50/4769741
aaaaatcac

SEQ ID NO: 190766 - DNA, 9 bp, Unknown
  misc_feature (1)..( 9): Result.005 file - promoters50/4769741
aaaaaaaaa

SEQ ID NO: 190767 - DNA, 9 bp, Unknown
  misc_feature (1)..( 9): Result.005 file - promoters50/4769741
cataccaaa

SEQ ID NO: 190768 - DNA, 9 bp, Unknown
  misc_feature (1)..( 9): Result.005 file - promoters50/4769741
atcaccaaa

SEQ ID NO: 190769 - DNA, 9 bp, Unknown
  misc_feature (1)..( 9): Result.005 file - promoters50/4769741
atcatcaat

SEQ ID NO: 190770 - DNA, 13 bp, Unknown
  misc_feature (1)..( 13): Result.005 file - promoters50/4770260
gttccctttatca

SEQ ID NO: 190771 - DNA, 13 bp, Unknown
  misc_feature (1)..( 13): Result.005 file - promoters50/4770260
attccatttctac

SEQ ID NO: 190772 - DNA, 13 bp, Unknown
  misc_feature (1)..( 13): Result.005 file - promoters50/4770260
gttcgcttgagga

SEQ ID NO: 190773 - DNA, 10 bp, Unknown
  misc_feature (1)..( 10): Result.005 file - promoters50/4770260
ccatttaaat

SEQ ID NO: 190774 - DNA, 13 bp, Unknown
  misc_feature (1)..( 13): Result.005 file - promoters50/4770260
ttagcattaaaat

SEQ ID NO: 190775 - DNA, 13 bp, Unknown
  misc_feature (1)..( 13): Result.005 file - promoters50/4770260
cgttttgtaaaat

SEQ ID NO: 190776 - DNA, 13 bp, Unknown
  misc_feature (1)..( 13): Result.005 file - promoters50/4770260
acttcaaagaaaa

SEQ ID NO: 190777 - DNA, 13 bp, Unknown
  misc_feature (1)..( 13): Result.005 file - promoters50/4770260
gtttcaaatgaac

SEQ ID NO: 190778 - DNA, 13 bp, Unknown
  misc_feature (1)..( 13): Result.005 file - promoters50/4770260
aattcaaaccttc

SEQ ID NO: 190779 - DNA, 13 bp, Unknown
  misc_feature (1)..( 13): Result.005 file - promoters50/4770260
tcatcaaacaaaa

SEQ ID NO: 190780 - DNA, 13 bp, Unknown
  misc_feature (1)..( 13): Result.005 file - promoters50/4770260
atttgaaatagta

SEQ ID NO: 190781 - DNA, 13 bp, Unknown
  misc_feature (1)..( 13): Result.005 file - promoters50/4770260
atttgaattgtga

SEQ ID NO: 190782 - DNA, 13 bp, Unknown
  misc_feature (1)..( 13): Result.005 file - promoters50/4770260
tgaggaaacaaat

SEQ ID NO: 190783 - DNA, 17 bp, Unknown
  misc_feature (1)..( 17): Result.005 file - promoters50/4770260
aattcttaaatttaaaa

SEQ ID NO: 190784 - DNA, 17 bp, Unknown
  misc_feature (1)..( 17): Result.005 file - promoters50/4770260
aattctaaaatcttcca

SEQ ID NO: 190785 - DNA, 17 bp, Unknown
  misc_feature (1)..( 17): Result.005 file - promoters50/4770260
caaactaaaatatcaac

SEQ ID NO: 190786 - DNA, 17 bp, Unknown
  misc_feature (1)..( 17): Result.005 file - promoters50/4770260
tgtggtaaaatttaccg

SEQ ID NO: 190787 - DNA, 17 bp, Unknown
  misc_feature (1)..( 17): Result.005 file - promoters50/4770260
ccaccatgaatgatttc

SEQ ID NO: 190788 - DNA, 17 bp, Unknown
  misc_feature (1)..( 17): Result.005 file - promoters50/4770260
ccttctaaggtcagtga

SEQ ID NO: 190789 - DNA, 13 bp, Unknown
  misc_feature (1)..( 13): Result.005 file - promoters50/4770264
tttcttaaaaaaa

SEQ ID NO: 190790 - DNA, 13 bp, Unknown
  misc_feature (1)..( 13): Result.005 file - promoters50/4770264
tttattaaaaaaa

SEQ ID NO: 190791 - DNA, 13 bp, Unknown
  misc_feature (1)..( 13): Result.005 file - promoters50/4770264
tttatttttagaa

SEQ ID NO: 190792 - DNA, 7 bp, Unknown
  misc_feature (1)..( 7): Result.005 file - promoters50/4770264
aaaatat

SEQ ID NO: 190793 - DNA, 7 bp, Unknown
  misc_feature (1)..( 7): Result.005 file - promoters50/4770264
aaaataa

SEQ ID NO: 190794 - DNA, 7 bp, Unknown
  misc_feature (1)..( 7): Result.005 file - promoters50/4770264
taaataa

SEQ ID NO: 190795 - DNA, 11 bp, Unknown
  misc_feature (1)..( 11): Result.005 file - promoters50/4770264
ttaaatatttc

SEQ ID NO: 190796 - DNA, 11 bp, Unknown
  misc_feature (1)..( 11): Result.005 file - promoters50/4770264
ttaattatttt

SEQ ID NO: 190797 - DNA, 11 bp, Unknown
  misc_feature (1)..( 11): Result.005 file - promoters50/4770264
ccaaatttttc

SEQ ID NO: 190798 - DNA, 11 bp, Unknown
  misc_feature (1)..( 11): Result.005 file - promoters50/4770264
gcaaatttagc

SEQ ID NO: 190799 - DNA, 9 bp, Unknown
  misc_feature (1)..( 9): Result.005 file - promoters50/4770264
gaatattat

SEQ ID NO: 190800 - DNA, 9 bp, Unknown
  misc_feature (1)..( 9): Result.005 file - promoters50/4770264
gaatatctt

SEQ ID NO: 190801 - DNA, 9 bp, Unknown
  misc_feature (1)..( 9): Result.005 file - promoters50/4770264
gaaaaaata

SEQ ID NO: 190802 - DNA, 9 bp, Unknown
  misc_feature (1)..( 9): Result.005 file - promoters50/4770264
gaaaaaatt

SEQ ID NO: 190803 - DNA, 7 bp, Unknown
  misc_feature (1)..( 7): Result.005 file - promoters50/4770264
attattt

SEQ ID NO: 190804 - DNA, 7 bp, Unknown
  misc_feature (1)..( 7): Result.005 file - promoters50/4770264
tttattt

SEQ ID NO: 190805 - DNA, 7 bp, Unknown
  misc_feature (1)..( 7): Result.005 file - promoters50/4770264
tttatta

SEQ ID NO: 190806 - DNA, 10 bp, Unknown
  misc_feature (1)..( 10): Result.005 file - promoters50/4770264
attgttataa

SEQ ID NO: 190807 - DNA, 10 bp, Unknown
  misc_feature (1)..( 10): Result.005 file - promoters50/4770264
atttttaaat

SEQ ID NO: 190808 - DNA, 10 bp, Unknown
  misc_feature (1)..( 10): Result.005 file - promoters50/4770264
agtttcaaat

SEQ ID NO: 190809 - DNA, 9 bp, Unknown
  misc_feature (1)..( 9): Result.005 file - promoters50/4770264
tcaaaaaat

SEQ ID NO: 190810 - DNA, 9 bp, Unknown
  misc_feature (1)..( 9): Result.005 file - promoters50/4770264
tgaaaaaat

SEQ ID NO: 190811 - DNA, 9 bp, Unknown
  misc_feature (1)..( 9): Result.005 file - promoters50/4770264
agaaaaaat

SEQ ID NO: 190812 - DNA, 9 bp, Unknown
  misc_feature (1)..( 9): Result.005 file - promoters50/4770264
tgaaagaat

SEQ ID NO: 190813 - DNA, 9 bp, Unknown
  misc_feature (1)..( 9): Result.005 file - promoters50/4770264
ccaaagaaa

SEQ ID NO: 190814 - DNA, 9 bp, Unknown
  misc_feature (1)..( 9): Result.005 file - promoters50/4770264
tgaaagaat

SEQ ID NO: 190815 - DNA, 9 bp, Unknown
  misc_feature (1)..( 9): Result.005 file - promoters50/4770264
tgaaaaaat

SEQ ID NO: 190816 - DNA, 8 bp, Unknown
  misc_feature (1)..( 8): Result.005 file - promoters50/4770264
gatatata

SEQ ID NO: 190817 - DNA, 8 bp, Unknown
  misc_feature (1)..( 8): Result.005 file - promoters50/4770264
gatgtatt

SEQ ID NO: 190818 - DNA, 8 bp, Unknown
  misc_feature (1)..( 8): Result.005 file - promoters50/4770264
tatggatt

SEQ ID NO: 190819 - DNA, 13 bp, Unknown
  misc_feature (1)..( 13): Result.005 file - promoters50/4770268
gattgttttgtat

SEQ ID NO: 190820 - DNA, 13 bp, Unknown
  misc_feature (1)..( 13): Result.005 file - promoters50/4770268
acaccttttgttg

SEQ ID NO: 190821 - DNA, 13 bp, Unknown
  misc_feature (1)..( 13): Result.005 file - promoters50/4770268
tatgtctttgtat

SEQ ID NO: 190822 - DNA, 13 bp, Unknown
  misc_feature (1)..( 13): Result.005 file - promoters50/4770268
aattattttgcta

SEQ ID NO: 190823 - DNA, 13 bp, Unknown
  misc_feature (1)..( 13): Result.005 file - promoters50/4770268
gtacgatttgtta

SEQ ID NO: 190824 - DNA, 13 bp, Unknown
  misc_feature (1)..( 13): Result.005 file - promoters50/4770268
aattattctcaag

SEQ ID NO: 190825 - DNA, 15 bp, Unknown
  misc_feature (1)..( 15): Result.005 file - promoters50/4770268
gggttttattttttg

SEQ ID NO: 190826 - DNA, 15 bp, Unknown
  misc_feature (1)..( 15): Result.005 file - promoters50/4770268
gaaatttattctgaa

SEQ ID NO: 190827 - DNA, 15 bp, Unknown
  misc_feature (1)..( 15): Result.005 file - promoters50/4770268
ctagtttattgttac

SEQ ID NO: 190828 - DNA, 15 bp, Unknown
  misc_feature (1)..( 15): Result.005 file - promoters50/4770268
gaattttgtttttga

SEQ ID NO: 190829 - DNA, 15 bp, Unknown
  misc_feature (1)..( 15): Result.005 file - promoters50/4770268
gttttttgtgcccca

SEQ ID NO: 190830 - DNA, 15 bp, Unknown
  misc_feature (1)..( 15): Result.005 file - promoters50/4770268
caaattgattttgat

SEQ ID NO: 190831 - DNA, 13 bp, Unknown
  misc_feature (1)..( 13): Result.005 file - promoters50/4770268
ttaattattaaag

SEQ ID NO: 190832 - DNA, 13 bp, Unknown
  misc_feature (1)..( 13): Result.005 file - promoters50/4770268
taaattatgttat

SEQ ID NO: 190833 - DNA, 13 bp, Unknown
  misc_feature (1)..( 13): Result.005 file - promoters50/4770268
tagtttattgtta

SEQ ID NO: 190834 - DNA, 13 bp, Unknown
  misc_feature (1)..( 13): Result.005 file - promoters50/4770268
aaaattatcagtc

SEQ ID NO: 190835 - DNA, 13 bp, Unknown
  misc_feature (1)..( 13): Result.005 file - promoters50/4770268
tgaattttgtttt

SEQ ID NO: 190836 - DNA, 13 bp, Unknown
  misc_feature (1)..( 13): Result.005 file - promoters50/4770268
tcgttttttgtgc

SEQ ID NO: 190837 - DNA, 13 bp, Unknown
  misc_feature (1)..( 13): Result.005 file - promoters50/4770268
ttgattttgataa

SEQ ID NO: 190838 - DNA, 13 bp, Unknown
  misc_feature (1)..( 13): Result.005 file - promoters50/4770274
gataatatacaat

SEQ ID NO: 190839 - DNA, 13 bp, Unknown
  misc_feature (1)..( 13): Result.005 file - promoters50/4770274
gattttatataat

SEQ ID NO: 190840 - DNA, 13 bp, Unknown
  misc_feature (1)..( 13): Result.005 file - promoters50/4770274
ttacatatacatt

SEQ ID NO: 190841 - DNA, 13 bp, Unknown
  misc_feature (1)..( 13): Result.005 file - promoters50/4770274
atagatatacttt

SEQ ID NO: 190842 - DNA, 13 bp, Unknown
  misc_feature (1)..( 13): Result.006 file - promoters50/4770274
tttaatataacgg

SEQ ID NO: 190843 - DNA, 13 bp, Unknown
  misc_feature (1)..( 13): Result.006 file - promoters50/4770274
gggatgatacatt

SEQ ID NO: 190844 - DNA, 11 bp, Unknown
  misc_feature (1)..( 11): Result.006 file - promoters50/4770274
gataatataca

SEQ ID NO: 190845 - DNA, 11 bp, Unknown
  misc_feature (1)..( 11): Result.006 file - promoters50/4770274
aatactatatg

SEQ ID NO: 190846 - DNA, 11 bp, Unknown
  misc_feature (1)..( 11): Result.006 file - promoters50/4770274
ttacatataca

SEQ ID NO: 190847 - DNA, 11 bp, Unknown
  misc_feature (1)..( 11): Result.006 file - promoters50/4770274
gatgatacatt

SEQ ID NO: 190848 - DNA, 11 bp, Unknown
  misc_feature (1)..( 11): Result.006 file - promoters50/4770274
tttaatataac

SEQ ID NO: 190849 - DNA, 11 bp, Unknown
  misc_feature (1)..( 11): Result.006 file - promoters50/4770274
atagatatact

SEQ ID NO: 190850 - DNA, 10 bp, Unknown
  misc_feature (1)..( 10): Result.006 file - promoters50/4770274
gataataaaa

SEQ ID NO: 190851 - DNA, 10 bp, Unknown
  misc_feature (1)..( 10): Result.006 file - promoters50/4770274
aagaataaac

SEQ ID NO: 190852 - DNA, 10 bp, Unknown
  misc_feature (1)..( 10): Result.006 file - promoters50/4770274
taaaataaaa

SEQ ID NO: 190853 - DNA, 10 bp, Unknown
  misc_feature (1)..( 10): Result.006 file - promoters50/4770274
aagtataaat

SEQ ID NO: 190854 - DNA, 10 bp, Unknown
  misc_feature (1)..( 10): Result.006 file - promoters50/4770274
acaaataaaa

SEQ ID NO: 190855 - DNA, 10 bp, Unknown
  misc_feature (1)..( 10): Result.006 file - promoters50/4770278
atatataata

SEQ ID NO: 190856 - DNA, 11 bp, Unknown
  misc_feature (1)..( 11): Result.006 file - promoters50/4770278
aaagatatttg

SEQ ID NO: 190857 - DNA, 11 bp, Unknown
  misc_feature (1)..( 11): Result.006 file - promoters50/4770278
aaatataatcg

SEQ ID NO: 190858 - DNA, 11 bp, Unknown
  misc_feature (1)..( 11): Result.006 file - promoters50/4770278
aaaggtattta

SEQ ID NO: 190859 - DNA, 11 bp, Unknown
  misc_feature (1)..( 11): Result.006 file - promoters50/4770278
caatgtagtta

SEQ ID NO: 190860 - DNA, 11 bp, Unknown
  misc_feature (1)..( 11): Result.006 file - promoters50/4770278
taatgtatttg

SEQ ID NO: 190861 - DNA, 11 bp, Unknown
  misc_feature (1)..( 11): Result.006 file - promoters50/4770278
ctttgtttttc

SEQ ID NO: 190862 - DNA, 11 bp, Unknown
  misc_feature (1)..( 11): Result.006 file - promoters50/4770278
ctatctttttc

SEQ ID NO: 190863 - DNA, 13 bp, Unknown
  misc_feature (1)..( 13): Result.006 file - promoters50/4770278
aaagatatttgta

SEQ ID NO: 190864 - DNA, 13 bp, Unknown
  misc_feature (1)..( 13): Result.006 file - promoters50/4770278
taatgtatttgtt

SEQ ID NO: 190865 - DNA, 13 bp, Unknown
  misc_feature (1)..( 13): Result.006 file - promoters50/4770278
aaaggtatttaag

SEQ ID NO: 190866 - DNA, 13 bp, Unknown
  misc_feature (1)..( 13): Result.006 file - promoters50/4770278
caatgtagttaga

SEQ ID NO: 190867 - DNA, 13 bp, Unknown
  misc_feature (1)..( 13): Result.006 file - promoters50/4770278
tgctttgtttttc

SEQ ID NO: 190868 - DNA, 13 bp, Unknown
  misc_feature (1)..( 13): Result.006 file - promoters50/4770288
ttctatctttttc

SEQ ID NO: 190869 - DNA, 12 bp, Unknown
  misc_feature (1)..( 12): Result.006 file - promoters50/4770288
ttcctaaacact

SEQ ID NO: 190870 - DNA, 12 bp, Unknown
  misc_feature (1)..( 12): Result.006 file - promoters50/4770288
taaataaacaaa

SEQ ID NO: 190871 - DNA, 12 bp, Unknown
  misc_feature (1)..( 12): Result.006 file - promoters50/4770288
aaattaaacaga

SEQ ID NO: 190872 - DNA, 11 bp, Unknown
  misc_feature (1)..( 11): Result.006 file - promoters50/4770288
tactaaactta

SEQ ID NO: 190873 - DNA, 11 bp, Unknown
  misc_feature (1)..( 11): Result.006 file - promoters50/4770288
cgataatcaaa

SEQ ID NO: 190874 - DNA, 11 bp, Unknown
  misc_feature (1)..( 11): Result.006 file - promoters50/4770288
taataaaaaac

SEQ ID NO: 190875 - DNA, 12 bp, Unknown
  misc_feature (1)..( 12): Result.006 file - promoters50/4770288
caatgaaagtag

SEQ ID NO: 190876 - DNA, 11 bp, Unknown
  misc_feature (1)..( 11): Result.006 file - promoters50/4770288
ttcaaacacaa

SEQ ID NO: 190877 - DNA, 11 bp, Unknown
  misc_feature (1)..( 11): Result.006 file - promoters50/4770288
aacaaacaaac

SEQ ID NO: 190878 - DNA, 11 bp, Unknown
  misc_feature (1)..( 11): Result.006 file - promoters50/4770288
aaaaaactcaa

SEQ ID NO: 190879 - DNA, 11 bp, Unknown
  misc_feature (1)..( 11): Result.006 file - promoters50/4770288
taaaaacaatg

SEQ ID NO: 190880 - DNA, 11 bp, Unknown
  misc_feature (1)..( 11): Result.006 file - promoters50/4770288
ttctaaccatt

SEQ ID NO: 190881 - DNA, 11 bp, Unknown
  misc_feature (1)..( 11): Result.006 file - promoters50/4770288
caaaaaccaca

SEQ ID NO: 190882 - DNA, 11 bp, Unknown
  misc_feature (1)..( 11): Result.006 file - promoters50/4770288
gaaaaaaaata

SEQ ID NO: 190883 - DNA, 11 bp, Unknown
  misc_feature (1)..( 11): Result.006 file - promoters50/4770288
aaaaaaaaatg

SEQ ID NO: 190884 - DNA, 16 bp, Unknown
  misc_feature (1)..( 16): Result.006 file - promoters50/4770288
tgcggatgaatatatg

SEQ ID NO: 190885 - DNA, 16 bp, Unknown
  misc_feature (1)..( 16): Result.006 file - promoters50/4770288
tatttcttaatataaa

SEQ ID NO: 190886 - DNA, 16 bp, Unknown
  misc_feature (1)..( 16): Result.006 file - promoters50/4770288
taaaatcaaataaatg

SEQ ID NO: 190887 - DNA, 16 bp, Unknown
  misc_feature (1)..( 16): Result.006 file - promoters50/4770288
aaccaatgaaaataac

SEQ ID NO: 190888 - DNA, 16 bp, Unknown
  misc_feature (1)..( 16): Result.006 file - promoters50/4770288
taaaagcaaataaata

SEQ ID NO: 190889 - DNA, 16 bp, Unknown
  misc_feature (1)..( 16): Result.006 file - promoters50/4770288
ttcaaccaattaaatt

SEQ ID NO: 190890 - DNA, 10 bp, Unknown
  misc_feature (1)..( 10): Result.006 file - promoters50/4770288
tcaaaaacca

SEQ ID NO: 190891 - DNA, 10 bp, Unknown
  misc_feature (1)..( 10): Result.006 file - promoters50/4770288
taaaaaactc

SEQ ID NO: 190892 - DNA, 10 bp, Unknown
  misc_feature (1)..( 10): Result.006 file - promoters50/4770288
ttaaaaacaa

SEQ ID NO: 190893 - DNA, 11 bp, Unknown
  misc_feature (1)..( 11): Result.006 file - promoters50/4770288
acaaacaactc

SEQ ID NO: 190894 - DNA, 11 bp, Unknown
  misc_feature (1)..( 11): Result.006 file - promoters50/4770288
caaacaaacag

SEQ ID NO: 190895 - DNA, 11 bp, Unknown
  misc_feature (1)..( 11): Result.006 file - promoters50/4770288
ggaaaaaaaat

SEQ ID NO: 190896 - DNA, 11 bp, Unknown
  misc_feature (1)..( 11): Result.006 file - promoters50/4770288
aaaaaaaaatg

SEQ ID NO: 190897 - DNA, 9 bp, Unknown
  misc_feature (1)..( 9): Result.006 file - promoters50/4770288
acaatgagg

SEQ ID NO: 190898 - DNA, 9 bp, Unknown
  misc_feature (1)..( 9): Result.006 file - promoters50/4770288
acaatgata

SEQ ID NO: 190899 - DNA, 9 bp, Unknown
  misc_feature (1)..( 9): Result.006 file - promoters50/4770288
acaatgaaa

SEQ ID NO: 190900 - DNA, 9 bp, Unknown
  misc_feature (1)..( 9): Result.006 file - promoters50/4770288
aaaatcaaa

SEQ ID NO: 190901 - DNA, 9 bp, Unknown
  misc_feature (1)..( 9): Result.006 file - promoters50/4770288
aaaataaaa

SEQ ID NO: 190902 - DNA, 9 bp, Unknown
  misc_feature (1)..( 9): Result.006 file - promoters50/4770288
ataatcaaa

SEQ ID NO: 190903 - DNA, 10 bp, Unknown
  misc_feature (1)..( 10): Result.006 file - promoters50/4770288
taaataaaca

SEQ ID NO: 190904 - DNA, 10 bp, Unknown
  misc_feature (1)..( 10): Result.006 file - promoters50/4770288
gtaataaaaa

SEQ ID NO: 190905 - DNA, 11 bp, Unknown
  misc_feature (1)..( 11): Result.006 file - promoters50/4770288
ttaattaaaaa

SEQ ID NO: 190906 - DNA, 11 bp, Unknown
  misc_feature (1)..( 11): Result.006 file - promoters50/4770288
ataatcaaaca

SEQ ID NO: 190907 - DNA, 11 bp, Unknown
  misc_feature (1)..( 11): Result.006 file - promoters50/4770288
caaaaaaaaat

SEQ ID NO: 190908 - DNA, 11 bp, Unknown
  misc_feature (1)..( 11): Result.006 file - promoters50/4770288
aatgttaaaaa

SEQ ID NO: 190909 - DNA, 12 bp, Unknown
  misc_feature (1)..( 12): Result.006 file - promoters50/4770288
ggaacaaacaaa

SEQ ID NO: 190910 - DNA, 12 bp, Unknown
  misc_feature (1)..( 12): Result.006 file - promoters50/4770288
ggaaaaaaaata

SEQ ID NO: 190911 - DNA, 12 bp, Unknown
  misc_feature (1)..( 12): Result.006 file - promoters50/4770288
caaacaaacagt

SEQ ID NO: 190912 - DNA, 12 bp, Unknown
  misc_feature (1)..( 12): Result.006 file - promoters50/4770288
ataaaaaactca

SEQ ID NO: 190913 - DNA, 12 bp, Unknown
  misc_feature (1)..( 12): Result.006 file - promoters50/4770288
ttaaaaacaatg

SEQ ID NO: 190914 - DNA, 12 bp, Unknown
  misc_feature (1)..( 12): Result.006 file - promoters50/4770305
caaaaaaaaatg

SEQ ID NO: 190915 - DNA, 11 bp, Unknown
  misc_feature (1)..( 11): Result.006 file - promoters50/4770305
aaagcactaca

SEQ ID NO: 190916 - DNA, 11 bp, Unknown
  misc_feature (1)..( 11): Result.006 file - promoters50/4770305
aaagaactata

SEQ ID NO: 190917 - DNA, 11 bp, Unknown
  misc_feature (1)..( 11): Result.006 file - promoters50/4770305
aaacaatatct

SEQ ID NO: 190918 - DNA, 11 bp, Unknown
  misc_feature (1)..( 11): Result.006 file - promoters50/4770305
catcaactatc

SEQ ID NO: 190919 - DNA, 11 bp, Unknown
  misc_feature (1)..( 11): Result.006 file - promoters50/4770305
tcagaattata

SEQ ID NO: 190920 - DNA, 11 bp, Unknown
  misc_feature (1)..( 11): Result.006 file - promoters50/4770333
aaagaaagatc

SEQ ID NO: 190921 - DNA, 17 bp, Unknown
  misc_feature (1)..( 17): Result.006 file - promoters50/4770333
gaaaaaaaaaaacagaa

SEQ ID NO: 190922 - DNA, 17 bp, Unknown
  misc_feature (1)..( 17): Result.006 file - promoters50/4770333
atatatttaaaacaatt

SEQ ID NO: 190923 - DNA, 17 bp, Unknown
  misc_feature (1)..( 17): Result.006 file - promoters50/4770333
gaaacaaagaaacatac

SEQ ID NO: 190924 - DNA, 17 bp, Unknown
  misc_feature (1)..( 17): Result.006 file - promoters50/4770333
tcatctctgaaacatat

SEQ ID NO: 190925 - DNA, 17 bp, Unknown
  misc_feature (1)..( 17): Result.006 file - promoters50/4770333
gactatagcaaagaatt

SEQ ID NO: 190926 - DNA, 17 bp, Unknown
  misc_feature (1)..( 17): Result.006 file - promoters50/4770367
aactcaaggaaaggagg

SEQ ID NO: 190927 - DNA, 11 bp, Unknown
  misc_feature (1)..( 11): Result.006 file - promoters50/4770367
ctttgattaaa

SEQ ID NO: 190928 - DNA, 11 bp, Unknown
  misc_feature (1)..( 11): Result.006 file - promoters50/4770367
cttttattaat

SEQ ID NO: 190929 - DNA, 11 bp, Unknown
  misc_feature (1)..( 11): Result.006 file - promoters50/4770367
gaaagatgaaa

SEQ ID NO: 190930 - DNA, 9 bp, Unknown
  misc_feature (1)..( 9): Result.006 file - promoters50/4770367
gcaaatagt

SEQ ID NO: 190931 - DNA, 9 bp, Unknown
  misc_feature (1)..( 9): Result.006 file - promoters50/4770367
gtaaacagt

SEQ ID NO: 190932 - DNA, 9 bp, Unknown
  misc_feature (1)..( 9): Result.006 file - promoters50/4770371
gtaaacaga

SEQ ID NO: 190933 - DNA, 9 bp, Unknown
  misc_feature (1)..( 9): Result.006 file - promoters50/4770371
gaaatagtt

SEQ ID NO: 190934 - DNA, 9 bp, Unknown
  misc_feature (1)..( 9): Result.006 file - promoters50/4770371
aaaattgtt

SEQ ID NO: 190935 - DNA, 9 bp, Unknown
  misc_feature (1)..( 9): Result.006 file - promoters50/4770371
taaaaagtt

SEQ ID NO: 190936 - DNA, 9 bp, Unknown
  misc_feature (1)..( 9): Result.006 file - promoters50/4770371
taaaaaaga

SEQ ID NO: 190937 - DNA, 10 bp, Unknown
  misc_feature (1)..( 10): Result.006 file - promoters50/4770371
taaaaagtaa

SEQ ID NO: 190938 - DNA, 10 bp, Unknown
  misc_feature (1)..( 10): Result.006 file - promoters50/4770371
gagaaaataa

SEQ ID NO: 190939 - DNA, 10 bp, Unknown
  misc_feature (1)..( 10): Result.006 file - promoters50/4770371
taaaaagtga

SEQ ID NO: 190940 - DNA, 8 bp, Unknown
  misc_feature (1)..( 8): Result.006 file - promoters50/4770371
taaaaagt

SEQ ID NO: 190941 - DNA, 8 bp, Unknown
  misc_feature (1)..( 8): Result.006 file - promoters50/4770371
taaaaaag

SEQ ID NO: 190942 - DNA, 8 bp, Unknown
  misc_feature (1)..( 8): Result.006 file - promoters50/4770371
taaaaagt

SEQ ID NO: 190943 - DNA, 13 bp, Unknown
  misc_feature (1)..( 13): Result.006 file - promoters50/4770371
aacgtaataaaaa

SEQ ID NO: 190944 - DNA, 13 bp, Unknown
  misc_feature (1)..( 13): Result.006 file - promoters50/4770371
aacataaaaaaaa

SEQ ID NO: 190945 - DNA, 13 bp, Unknown
  misc_feature (1)..( 13): Result.006 file - promoters50/4770371
ctctaaataaaaa

SEQ ID NO: 190946 - DNA, 10 bp, Unknown
  misc_feature (1)..( 10): Result.006 file - promoters50/4770371
taaaagcaaa

SEQ ID NO: 190947 - DNA, 10 bp, Unknown
  misc_feature (1)..( 10): Result.006 file - promoters50/4770371
taaaagaaaa

SEQ ID NO: 190948 - DNA, 10 bp, Unknown
  misc_feature (1)..( 10): Result.006 file - promoters50/4770371
aaaaagacca

SEQ ID NO: 190949 - DNA, 8 bp, Unknown
  misc_feature (1)..( 8): Result.006 file - promoters50/4770371
aaaaaaga

SEQ ID NO: 190950 - DNA, 8 bp, Unknown
  misc_feature (1)..( 8): Result.006 file - promoters50/4770371
aaaaaagt

SEQ ID NO: 190951 - DNA, 8 bp, Unknown
  misc_feature (1)..( 8): Result.006 file - promoters50/4770371
gaaaaaga

SEQ ID NO: 190952 - DNA, 7 bp, Unknown
  misc_feature (1)..( 7): Result.006 file - promoters50/4770371
ccaaaac

SEQ ID NO: 190953 - DNA, 7 bp, Unknown
  misc_feature (1)..( 7): Result.006 file - promoters50/4770371
ccaaaaa

SEQ ID NO: 190954 - DNA, 7 bp, Unknown
  misc_feature (1)..( 7): Result.006 file - promoters50/4770371
acaaaaa

SEQ ID NO: 190955 - DNA, 8 bp, Unknown
  misc_feature (1)..( 8): Result.006 file - promoters50/4770371
caaaacaa

SEQ ID NO: 190956 - DNA, 8 bp, Unknown
  misc_feature (1)..( 8): Result.006 file - promoters50/4770371
caaaccaa

SEQ ID NO: 190957 - DNA, 8 bp, Unknown
  misc_feature (1)..( 8): Result.006 file - promoters50/4770371
gaaaacaa

SEQ ID NO: 190958 - DNA, 8 bp, Unknown
  misc_feature (1)..( 8): Result.006 file - promoters50/4770371
atataata

SEQ ID NO: 190959 - DNA, 8 bp, Unknown
  misc_feature (1)..( 8): Result.006 file - promoters50/4770371
agataata

SEQ ID NO: 190960 - DNA, 8 bp, Unknown
  misc_feature (1)..( 8): Result.006 file - promoters50/4770371
agaaaatg

SEQ ID NO: 190961 - DNA, 9 bp, Unknown
  misc_feature (1)..( 9): Result.006 file - promoters50/4770371
atgtttgat

SEQ ID NO: 190962 - DNA, 9 bp, Unknown
  misc_feature (1)..( 9): Result.006 file - promoters50/4770371
atgtatgat

SEQ ID NO: 190963 - DNA, 9 bp, Unknown
  misc_feature (1)..( 9): Result.006 file - promoters50/4770371
atgtattat

SEQ ID NO: 190964 - DNA, 7 bp, Unknown
  misc_feature (1)..( 7): Result.006 file - promoters50/4770371
taataag

SEQ ID NO: 190965 - DNA, 7 bp, Unknown
  misc_feature (1)..( 7): Result.006 file - promoters50/4770371
taataat

SEQ ID NO: 190966 - DNA, 7 bp, Unknown
  misc_feature (1)..( 7): Result.006 file - promoters50/4770371
taagaat

SEQ ID NO: 190967 - DNA, 12 bp, Unknown
  misc_feature (1)..( 12): Result.006 file - promoters50/4770371
atggaaaatgat

SEQ ID NO: 190968 - DNA, 12 bp, Unknown
  misc_feature (1)..( 12): Result.006 file - promoters50/4770371
aaaaaaaaagat

SEQ ID NO: 190969 - DNA, 12 bp, Unknown
  misc_feature (1)..( 12): Result.006 file - promoters50/4770379
aaagaaaaaaaa

SEQ ID NO: 190970 - DNA, 10 bp, Unknown
  misc_feature (1)..( 10): Result.006 file - promoters50/4770379
tatataaaga

SEQ ID NO: 190971 - DNA, 10 bp, Unknown
  misc_feature (1)..( 10): Result.006 file - promoters50/4770379
aatataaaca

SEQ ID NO: 190972 - DNA, 10 bp, Unknown
  misc_feature (1)..( 10): Result.006 file - promoters50/4770379
tatatataca

SEQ ID NO: 190973 - DNA, 10 bp, Unknown
  misc_feature (1)..( 10): Result.006 file - promoters50/4770379
tatttaacgg

SEQ ID NO: 190974 - DNA, 10 bp, Unknown
  misc_feature (1)..( 10): Result.006 file - promoters50/4770379
catatatatc

SEQ ID NO: 190975 - DNA, 10 bp, Unknown
  misc_feature (1)..( 10): Result.006 file - promoters50/4770379
catattaaca

SEQ ID NO: 190976 - DNA, 8 bp, Unknown
  misc_feature (1)..( 8): Result.006 file - promoters50/4770379
aattttta

SEQ ID NO: 190977 - DNA, 8 bp, Unknown
  misc_feature (1)..( 8): Result.006 file - promoters50/4770379
ttttttta

SEQ ID NO: 190978 - DNA, 8 bp, Unknown
  misc_feature (1)..( 8): Result.006 file - promoters50/4770379
aatttttt

SEQ ID NO: 190979 - DNA, 9 bp, Unknown
  misc_feature (1)..( 9): Result.006 file - promoters50/4770379
cttttcttt

SEQ ID NO: 190980 - DNA, 9 bp, Unknown
  misc_feature (1)..( 9): Result.006 file - promoters50/4770379
tttttctta

SEQ ID NO: 190981 - DNA, 9 bp, Unknown
  misc_feature (1)..( 9): Result.006 file - promoters50/4770379
aatttatta

SEQ ID NO: 190982 - DNA, 14 bp, Unknown
  misc_feature (1)..( 14): Result.006 file - promoters50/4770379
tcagatatacattg

SEQ ID NO: 190983 - DNA, 14 bp, Unknown
  misc_feature (1)..( 14): Result.006 file - promoters50/4770379
ttttctataaatta

SEQ ID NO: 190984 - DNA, 14 bp, Unknown
  misc_feature (1)..( 14): Result.006 file - promoters50/4770379
acggatttacttga

SEQ ID NO: 190985 - DNA, 14 bp, Unknown
  misc_feature (1)..( 14): Result.006 file - promoters50/4770379
agagctaaaaacgg

SEQ ID NO: 190986 - DNA, 14 bp, Unknown
  misc_feature (1)..( 14): Result.006 file - promoters50/4770379
ttttttatagatta

SEQ ID NO: 190987 - DNA, 14 bp, Unknown
  misc_feature (1)..( 14): Result.006 file - promoters50/4770379
ccggttttgataat

SEQ ID NO: 190988 - DNA, 14 bp, Unknown
  misc_feature (1)..( 14): Result.006 file - promoters50/4770398
ctttatatagagac

SEQ ID NO: 190989 - DNA, 9 bp, Unknown
  misc_feature (1)..( 9): Result.006 file - promoters50/4770398
cttaatcat

SEQ ID NO: 190990 - DNA, 9 bp, Unknown
  misc_feature (1)..( 9): Result.006 file - promoters50/4770398
tctaagcat

SEQ ID NO: 190991 - DNA, 9 bp, Unknown
  misc_feature (1)..( 9): Result.006 file - promoters50/4770398
cttaatctt

SEQ ID NO: 190992 - DNA, 9 bp, Unknown
  misc_feature (1)..( 9): Result.006 file - promoters50/4770398
cccaatcat

SEQ ID NO: 190993 - DNA, 9 bp, Unknown
  misc_feature (1)..( 9): Result.006 file - promoters50/4770398
aacaatcac

SEQ ID NO: 190994 - DNA, 9 bp, Unknown
  misc_feature (1)..( 9): Result.006 file - promoters50/4770398
taaaatcat

SEQ ID NO: 190995 - DNA, 9 bp, Unknown
  misc_feature (1)..( 9): Result.006 file - promoters50/4770406
cacaatcaa

SEQ ID NO: 190996 - DNA, 9 bp, Unknown
  misc_feature (1)..( 9): Result.006 file - promoters50/4770406
taacaaaca

SEQ ID NO: 190997 - DNA, 9 bp, Unknown
  misc_feature (1)..( 9): Result.006 file - promoters50/4770406
taataaaca

SEQ ID NO: 190998 - DNA, 9 bp, Unknown
  misc_feature (1)..( 9): Result.006 file - promoters50/4770406
taataagta

SEQ ID NO: 190999 - DNA, 8 bp, Unknown
  misc_feature (1)..( 8): Result.006 file - promoters50/4770406
aacataaa

SEQ ID NO: 191000 - DNA, 8 bp, Unknown
  misc_feature (1)..( 8): Result.006 file - promoters50/4770406
aacacaaa

SEQ ID NO: 191001 - DNA, 8 bp, Unknown
  misc_feature (1)..( 8): Result.006 file - promoters50/4770406
aacataga

SEQ ID NO: 191002 - DNA, 6 bp, Unknown
  misc_feature (1)..( 6): Result.006 file - promoters50/4770406
tgtttt

SEQ ID NO: 191003 - DNA, 6 bp, Unknown
  misc_feature (1)..( 6): Result.006 file - promoters50/4770406
tgtttt

SEQ ID NO: 191004 - DNA, 6 bp, Unknown
  misc_feature (1)..( 6): Result.006 file - promoters50/4770414
tgtttt

SEQ ID NO: 191005 - DNA, 11 bp, Unknown
  misc_feature (1)..( 11): Result.006 file - promoters50/4770414
tcaaaacaaaa

SEQ ID NO: 191006 - DNA, 11 bp, Unknown
  misc_feature (1)..( 11): Result.006 file - promoters50/4770414
tcaacacaaaa

SEQ ID NO: 191007 - DNA, 11 bp, Unknown
  misc_feature (1)..( 11): Result.006 file - promoters50/4770414
gcaacaaattt

SEQ ID NO: 191008 - DNA, 8 bp, Unknown
  misc_feature (1)..( 8): Result.006 file - promoters50/4770414
atataaac

SEQ ID NO: 191009 - DNA, 8 bp, Unknown
  misc_feature (1)..( 8): Result.006 file - promoters50/4770414
ataaaaac

SEQ ID NO: 191010 - DNA, 8 bp, Unknown
  misc_feature (1)..( 8): Result.006 file - promoters50/4770428
ctataaaa

SEQ ID NO: 191011 - DNA, 11 bp, Unknown
  misc_feature (1)..( 11): Result.006 file - promoters50/4770428
agtttgtttga

SEQ ID NO: 191012 - DNA, 11 bp, Unknown
  misc_feature (1)..( 11): Result.006 file - promoters50/4770428
gttttggttga

SEQ ID NO: 191013 - DNA, 11 bp, Unknown
  misc_feature (1)..( 11): Result.006 file - promoters50/4770428
ggtttgtataa

SEQ ID NO: 191014 - DNA, 11 bp, Unknown
  misc_feature (1)..( 11): Result.006 file - promoters50/4770428
ggtgtgtattg

SEQ ID NO: 191015 - DNA, 11 bp, Unknown
  misc_feature (1)..( 11): Result.006 file - promoters50/4770428
gacgtgtattc

SEQ ID NO: 191016 - DNA, 11 bp, Unknown
  misc_feature (1)..( 11): Result.006 file - promoters50/4770439
actttgggtga

SEQ ID NO: 191017 - DNA, 10 bp, Unknown
  misc_feature (1)..( 10): Result.006 file - promoters50/4770439
atacaataat

SEQ ID NO: 191018 - DNA, 10 bp, Unknown
  misc_feature (1)..( 10): Result.006 file - promoters50/4770439
ttactataat

SEQ ID NO: 191019 - DNA, 10 bp, Unknown
  misc_feature (1)..( 10): Result.006 file - promoters50/4770439
atagaatgat

SEQ ID NO: 191020 - DNA, 7 bp, Unknown
  misc_feature (1)..( 7): Result.006 file - promoters50/4770439
cacaaac

SEQ ID NO: 191021 - DNA, 7 bp, Unknown
  misc_feature (1)..( 7): Result.006 file - promoters50/4770439
aacaaac

SEQ ID NO: 191022 - DNA, 7 bp, Unknown
  misc_feature (1)..( 7): Result.006 file - promoters50/4770443
aaccaac

SEQ ID NO: 191023 - DNA, 17 bp, Unknown
  misc_feature (1)..( 17): Result.006 file - promoters50/4770443
atttgtttatttccaat

SEQ ID NO: 191024 - DNA, 17 bp, Unknown
  misc_feature (1)..( 17): Result.006 file - promoters50/4770443
aaaaatttttttttaaa

SEQ ID NO: 191025 - DNA, 17 bp, Unknown
  misc_feature (1)..( 17): Result.006 file - promoters50/4770443
tatcgttgatttaataa

SEQ ID NO: 191026 - DNA, 17 bp, Unknown
  misc_feature (1)..( 17): Result.006 file - promoters50/4770443
aaatatttttttgtact

SEQ ID NO: 191027 - DNA, 17 bp, Unknown
  misc_feature (1)..( 17): Result.006 file - promoters50/4770443
gtcaactgatataataa

SEQ ID NO: 191028 - DNA, 17 bp, Unknown
  misc_feature (1)..( 17): Result.006 file - promoters50/4770447
aaaaattacggtagttt

SEQ ID NO: 191029 - DNA, 7 bp, Unknown
  misc_feature (1)..( 7): Result.006 file - promoters50/4770447
ttgttta

SEQ ID NO: 191030 - DNA, 7 bp, Unknown
  misc_feature (1)..( 7): Result.006 file - promoters50/4770447
ttgttta

SEQ ID NO: 191031 - DNA, 7 bp, Unknown
  misc_feature (1)..( 7): Result.006 file - promoters50/4770447
ttggtta

SEQ ID NO: 191032 - DNA, 13 bp, Unknown
  misc_feature (1)..( 13): Result.006 file - promoters50/4770447
tttacttgttggg

SEQ ID NO: 191033 - DNA, 13 bp, Unknown
  misc_feature (1)..( 13): Result.006 file - promoters50/4770447
ttttcttactaag

SEQ ID NO: 191034 - DNA, 13 bp, Unknown
  misc_feature (1)..( 13): Result.006 file - promoters50/4770466
ccttcttaccaag

SEQ ID NO: 191035 - DNA, 17 bp, Unknown
  misc_feature (1)..( 17): Result.006 file - promoters50/4770466
ttaacttatctcgattt

SEQ ID NO: 191036 - DNA, 17 bp, Unknown
  misc_feature (1)..( 17): Result.006 file - promoters50/4770466
gtcttatatttcgaaaa

SEQ ID NO: 191037 - DNA, 17 bp, Unknown
  misc_feature (1)..( 17): Result.006 file - promoters50/4770466
tagttttatgttttttt

SEQ ID NO: 191038 - DNA, 17 bp, Unknown
  misc_feature (1)..( 17): Result.006 file - promoters50/4770466
tgtctcaatgtttgttt

SEQ ID NO: 191039 - DNA, 9 bp, Unknown
  misc_feature (1)..( 9): Result.006 file - promoters50/4770466
ataataaat

SEQ ID NO: 191040 - DNA, 9 bp, Unknown
  misc_feature (1)..( 9): Result.006 file - promoters50/4770466
ttaacaaac

SEQ ID NO: 191041 - DNA, 9 bp, Unknown
  misc_feature (1)..( 9): Result.006 file - promoters50/4770466
ccaattaat

SEQ ID NO: 191042 - DNA, 9 bp, Unknown
  misc_feature (1)..( 9): Result.006 file - promoters50/4770466
ttaacaaaa

SEQ ID NO: 191043 - DNA, 13 bp, Unknown
  misc_feature (1)..( 13): Result.006 file - promoters50/4770466
aaacatttaatat

SEQ ID NO: 191044 - DNA, 13 bp, Unknown
  misc_feature (1)..( 13): Result.006 file - promoters50/4770466
aaagattaaaaat

SEQ ID NO: 191045 - DNA, 13 bp, Unknown
  misc_feature (1)..( 13): Result.006 file - promoters50/4770466
ccacattttatat

SEQ ID NO: 191046 - DNA, 13 bp, Unknown
  misc_feature (1)..( 13): Result.006 file - promoters50/4770481
taagatgaaatga

SEQ ID NO: 191047 - DNA, 14 bp, Unknown
  misc_feature (1)..( 14): Result.006 file - promoters50/4770481
agaataagcaaatc

SEQ ID NO: 191048 - DNA, 14 bp, Unknown
  misc_feature (1)..( 14): Result.006 file - promoters50/4770481
gtcatatgcaataa

SEQ ID NO: 191049 - DNA, 14 bp, Unknown
  misc_feature (1)..( 14): Result.006 file - promoters50/4770481
aaaatcagccagaa

SEQ ID NO: 191050 - DNA, 14 bp, Unknown
  misc_feature (1)..( 14): Result.006 file - promoters50/4770481
ttaaaaagtaaata

SEQ ID NO: 191051 - DNA, 14 bp, Unknown
  misc_feature (1)..( 14): Result.006 file - promoters50/4770481
tcgttatccaataa

SEQ ID NO: 191052 - DNA, 14 bp, Unknown
  misc_feature (1)..( 14): Result.006 file - promoters50/4770481
aatataaataatta

SEQ ID NO: 191053 - DNA, 11 bp, Unknown
  misc_feature (1)..( 11): Result.006 file - promoters50/4770481
gagaaacatgt

SEQ ID NO: 191054 - DNA, 11 bp, Unknown
  misc_feature (1)..( 11): Result.006 file - promoters50/4770481
atgaaacagag

SEQ ID NO: 191055 - DNA, 11 bp, Unknown
  misc_feature (1)..( 11): Result.006 file - promoters50/4770481
gagaaacgacg

SEQ ID NO: 191056 - DNA, 11 bp, Unknown
  misc_feature (1)..( 11): Result.006 file - promoters50/4770481
ataaaacattt

SEQ ID NO: 191057 - DNA, 11 bp, Unknown
  misc_feature (1)..( 11): Result.006 file - promoters50/4770481
ccaaaaaatgt

SEQ ID NO: 191058 - DNA, 11 bp, Unknown
  misc_feature (1)..( 11): Result.006 file - promoters50/4770481
acaaaacaaaa

SEQ ID NO: 191059 - DNA, 9 bp, Unknown
  misc_feature (1)..( 9): Result.006 file - promoters50/4770481
acagataac

SEQ ID NO: 191060 - DNA, 9 bp, Unknown
  misc_feature (1)..( 9): Result.006 file - promoters50/4770481
gcagatatt

SEQ ID NO: 191061 - DNA, 9 bp, Unknown
  misc_feature (1)..( 9): Result.006 file - promoters50/4770481
gcaaataca

SEQ ID NO: 191062 - DNA, 9 bp, Unknown
  misc_feature (1)..( 9): Result.006 file - promoters50/4770481
ccaaataaa

SEQ ID NO: 191063 - DNA, 9 bp, Unknown
  misc_feature (1)..( 9): Result.006 file - promoters50/4770481
tcaaataag

SEQ ID NO: 191064 - DNA, 9 bp, Unknown
  misc_feature (1)..( 9): Result.006 file - promoters50/4770499
tgtaataag

SEQ ID NO: 191065 - DNA, 8 bp, Unknown
  misc_feature (1)..( 8): Result.006 file - promoters50/4770499
tttttaat

SEQ ID NO: 191066 - DNA, 8 bp, Unknown
  misc_feature (1)..( 8): Result.006 file - promoters50/4770499
gttttaat

SEQ ID NO: 191067 - DNA, 9 bp, Unknown
  misc_feature (1)..( 9): Result.006 file - promoters50/4770499
ctttgtaac

SEQ ID NO: 191068 - DNA, 10 bp, Unknown
  misc_feature (1)..( 10): Result.006 file - promoters50/4770499
gattaaaatt

SEQ ID NO: 191069 - DNA, 10 bp, Unknown
  misc_feature (1)..( 10): Result.006 file - promoters50/4770499
aaataaaata

SEQ ID NO: 191070 - DNA, 10 bp, Unknown
  misc_feature (1)..( 10): Result.006 file - promoters50/4770562
aaatgaaata

SEQ ID NO: 191071 - DNA, 7 bp, Unknown
  misc_feature (1)..( 7): Result.006 file - promoters50/4770562
caacttg

SEQ ID NO: 191072 - DNA, 7 bp, Unknown
  misc_feature (1)..( 7): Result.006 file - promoters50/4770562
caaattg

SEQ ID NO: 191073 - DNA, 7 bp, Unknown
  misc_feature (1)..( 7): Result.006 file - promoters50/4770562
caacttc

SEQ ID NO: 191074 - DNA, 7 bp, Unknown
  misc_feature (1)..( 7): Result.006 file - promoters50/4770562
aaaatat

SEQ ID NO: 191075 - DNA, 7 bp, Unknown
  misc_feature (1)..( 7): Result.006 file - promoters50/4770562
aaaatag

SEQ ID NO: 191076 - DNA, 7 bp, Unknown
  misc_feature (1)..( 7): Result.006 file - promoters50/4770562
taaatat

SEQ ID NO: 191077 - DNA, 14 bp, Unknown
  misc_feature (1)..( 14): Result.006 file - promoters50/4770562
catactaaattgtt

SEQ ID NO: 191078 - DNA, 14 bp, Unknown
  misc_feature (1)..( 14): Result.006 file - promoters50/4770562
tctcttaatttggg

SEQ ID NO: 191079 - DNA, 14 bp, Unknown
  misc_feature (1)..( 14): Result.006 file - promoters50/4770562
acctgatattaggg

SEQ ID NO: 191080 - DNA, 14 bp, Unknown
  misc_feature (1)..( 14): Result.006 file - promoters50/4770562
aaaactgattttag

SEQ ID NO: 191081 - DNA, 12 bp, Unknown
  misc_feature (1)..( 12): Result.006 file - promoters50/4770562
gatctatcaaac

SEQ ID NO: 191082 - DNA, 12 bp, Unknown
  misc_feature (1)..( 12): Result.006 file - promoters50/4770562
aaaatatgaaaa

SEQ ID NO: 191083 - DNA, 12 bp, Unknown
  misc_feature (1)..( 12): Result.006 file - promoters50/4770562
aaaaaatgaaaa

SEQ ID NO: 191084 - DNA, 10 bp, Unknown
  misc_feature (1)..( 10): Result.006 file - promoters50/4770562
gatatataaa

SEQ ID NO: 191085 - DNA, 10 bp, Unknown
  misc_feature (1)..( 10): Result.006 file - promoters50/4770562
tatatttaaa

SEQ ID NO: 191086 - DNA, 10 bp, Unknown
  misc_feature (1)..( 10): Result.006 file - promoters50/4770562
tatgtttatt

SEQ ID NO: 191087 - DNA, 8 bp, Unknown
  misc_feature (1)..( 8): Result.006 file - promoters50/4770562
tatataaa

SEQ ID NO: 191088 - DNA, 8 bp, Unknown
  misc_feature (1)..( 8): Result.006 file - promoters50/4770562
tttataaa

SEQ ID NO: 191089 - DNA, 8 bp, Unknown
  misc_feature (1)..( 8): Result.006 file - promoters50/4770562
tatataat

SEQ ID NO: 191090 - DNA, 8 bp, Unknown
  misc_feature (1)..( 8): Result.006 file - promoters50/4770562
ccatgtaa

SEQ ID NO: 191091 - DNA, 8 bp, Unknown
  misc_feature (1)..( 8): Result.006 file - promoters50/4770562
gaatgtaa

SEQ ID NO: 191092 - DNA, 8 bp, Unknown
  misc_feature (1)..( 8): Result.006 file - promoters50/4770594
gaatgtac

SEQ ID NO: 191093 - DNA, 14 bp, Unknown
  misc_feature (1)..( 14): Result.006 file - promoters50/4770594
aaaatcattacaat

SEQ ID NO: 191094 - DNA, 14 bp, Unknown
  misc_feature (1)..( 14): Result.006 file - promoters50/4770594
ataatgattctttt

SEQ ID NO: 191095 - DNA, 14 bp, Unknown
  misc_feature (1)..( 14): Result.006 file - promoters50/4770594
caaaacattaaaat

SEQ ID NO: 191096 - DNA, 14 bp, Unknown
  misc_feature (1)..( 14): Result.006 file - promoters50/4770594
caaaacgaatacca

SEQ ID NO: 191097 - DNA, 14 bp, Unknown
  misc_feature (1)..( 14): Result.006 file - promoters50/4770594
aaaatctgtttacc

SEQ ID NO: 191098 - DNA, 14 bp, Unknown
  misc_feature (1)..( 14): Result.006 file - promoters50/4770594
caatacattcatgt

SEQ ID NO: 191099 - DNA, 14 bp, Unknown
  misc_feature (1)..( 14): Result.006 file - promoters50/4770594
caaaataataataa

SEQ ID NO: 191100 - DNA, 14 bp, Unknown
  misc_feature (1)..( 14): Result.006 file - promoters50/4770594
cgaaaccgaaagaa

SEQ ID NO: 191101 - DNA, 14 bp, Unknown
  misc_feature (1)..( 14): Result.006 file - promoters50/4770594
aaatcattacaata

SEQ ID NO: 191102 - DNA, 14 bp, Unknown
  misc_feature (1)..( 14): Result.006 file - promoters50/4770594
cttactttataatg

SEQ ID NO: 191103 - DNA, 14 bp, Unknown
  misc_feature (1)..( 14): Result.006 file - promoters50/4770594
aaaacattaaaatc

SEQ ID NO: 191104 - DNA, 14 bp, Unknown
  misc_feature (1)..( 14): Result.006 file - promoters50/4770594
aaacgaataccata

SEQ ID NO: 191105 - DNA, 14 bp, Unknown
  misc_feature (1)..( 14): Result.006 file - promoters50/4770594
aacgttttacaata

SEQ ID NO: 191106 - DNA, 14 bp, Unknown
  misc_feature (1)..( 14): Result.006 file - promoters50/4770594
gtgacttcatagag

SEQ ID NO: 191107 - DNA, 14 bp, Unknown
  misc_feature (1)..( 14): Result.006 file - promoters50/4770594
taaacttcaaaacc

SEQ ID NO: 191108 - DNA, 11 bp, Unknown
  misc_feature (1)..( 11): Result.006 file - promoters50/4770594
atatatgaaac

SEQ ID NO: 191109 - DNA, 11 bp, Unknown
  misc_feature (1)..( 11): Result.006 file - promoters50/4770594
atttattaaat

SEQ ID NO: 191110 - DNA, 11 bp, Unknown
  misc_feature (1)..( 11): Result.006 file - promoters50/4770594
atatctgaaat

SEQ ID NO: 191111 - DNA, 11 bp, Unknown
  misc_feature (1)..( 11): Result.006 file - promoters50/4770594
gttttttacta

SEQ ID NO: 191112 - DNA, 11 bp, Unknown
  misc_feature (1)..( 11): Result.006 file - promoters50/4770594
tttgcttttaa

SEQ ID NO: 191113 - DNA, 11 bp, Unknown
  misc_feature (1)..( 11): Result.006 file - promoters50/4770594
aaaccttaaat

SEQ ID NO: 191114 - DNA, 11 bp, Unknown
  misc_feature (1)..( 11): Result.006 file - promoters50/4770604
atatatgatgc

SEQ ID NO: 191115 - DNA, 8 bp, Unknown
  misc_feature (1)..( 8): Result.006 file - promoters50/4770604
tatattaa

SEQ ID NO: 191116 - DNA, 8 bp, Unknown
  misc_feature (1)..( 8): Result.006 file - promoters50/4770604
tatattct

SEQ ID NO: 191117 - DNA, 8 bp, Unknown
  misc_feature (1)..( 8): Result.006 file - promoters50/4770604
tatactaa

SEQ ID NO: 191118 - DNA, 8 bp, Unknown
  misc_feature (1)..( 8): Result.006 file - promoters50/4770604
gatattac

SEQ ID NO: 191119 - DNA, 13 bp, Unknown
  misc_feature (1)..( 13): Result.006 file - promoters50/4770604
tgaaattcacatt

SEQ ID NO: 191120 - DNA, 13 bp, Unknown
  misc_feature (1)..( 13): Result.006 file - promoters50/4770604
aatcattaacaaa

SEQ ID NO: 191121 - DNA, 13 bp, Unknown
  misc_feature (1)..( 13): Result.006 file - promoters50/4770604
cctcaataagttc

SEQ ID NO: 191122 - DNA, 13 bp, Unknown
  misc_feature (1)..( 13): Result.006 file - promoters50/4770604
aatgattaagaaa

SEQ ID NO: 191123 - DNA, 13 bp, Unknown
  misc_feature (1)..( 13): Result.006 file - promoters50/4770604
aatgatttcattt

SEQ ID NO: 191124 - DNA, 9 bp, Unknown
  misc_feature (1)..( 9): Result.006 file - promoters50/4770604
aaattttaa

SEQ ID NO: 191125 - DNA, 9 bp, Unknown
  misc_feature (1)..( 9): Result.006 file - promoters50/4770604
gtattttac

SEQ ID NO: 191126 - DNA, 9 bp, Unknown
  misc_feature (1)..( 9): Result.006 file - promoters50/4770604
ctattttta

SEQ ID NO: 191127 - DNA, 9 bp, Unknown
  misc_feature (1)..( 9): Result.006 file - promoters50/4770604
ctattttta

SEQ ID NO: 191128 - DNA, 10 bp, Unknown
  misc_feature (1)..( 10): Result.006 file - promoters50/4770604
ggcaaaggaa

SEQ ID NO: 191129 - DNA, 10 bp, Unknown
  misc_feature (1)..( 10): Result.006 file - promoters50/4770604
caaaaatgaa

SEQ ID NO: 191130 - DNA, 10 bp, Unknown
  misc_feature (1)..( 10): Result.006 file - promoters50/4770604
caaaaaagaa

SEQ ID NO: 191131 - DNA, 10 bp, Unknown
  misc_feature (1)..( 10): Result.006 file - promoters50/4770604
gtaaaataaa

SEQ ID NO: 191132 - DNA, 10 bp, Unknown
  misc_feature (1)..( 10): Result.006 file - promoters50/4770604
caaatattag

SEQ ID NO: 191133 - DNA, 10 bp, Unknown
  misc_feature (1)..( 10): Result.006 file - promoters50/4770604
gaaatattct

SEQ ID NO: 191134 - DNA, 10 bp, Unknown
  misc_feature (1)..( 10): Result.006 file - promoters50/4770604
aacataatct

SEQ ID NO: 191135 - DNA, 10 bp, Unknown
  misc_feature (1)..( 10): Result.006 file - promoters50/4770604
gaaataaaag

SEQ ID NO: 191136 - DNA, 10 bp, Unknown
  misc_feature (1)..( 10): Result.006 file - promoters50/4770604
attaaaatat

SEQ ID NO: 191137 - DNA, 10 bp, Unknown
  misc_feature (1)..( 10): Result.006 file - promoters50/4770604
tttataattg

SEQ ID NO: 191138 - DNA, 10 bp, Unknown
  misc_feature (1)..( 10): Result.006 file - promoters50/4770604
gctataattg

SEQ ID NO: 191139 - DNA, 10 bp, Unknown
  misc_feature (1)..( 10): Result.006 file - promoters50/4770620
tttatactca

SEQ ID NO: 191140 - DNA, 11 bp, Unknown
  misc_feature (1)..( 11): Result.006 file - promoters50/4770620
atcataaataa

SEQ ID NO: 191141 - DNA, 11 bp, Unknown
  misc_feature (1)..( 11): Result.006 file - promoters50/4770620
atcatcaatct

SEQ ID NO: 191142 - DNA, 11 bp, Unknown
  misc_feature (1)..( 11): Result.006 file - promoters50/4770620
cggataaatta

SEQ ID NO: 191143 - DNA, 11 bp, Unknown
  misc_feature (1)..( 11): Result.006 file - promoters50/4770620
ttcttaaattt

SEQ ID NO: 191144 - DNA, 11 bp, Unknown
  misc_feature (1)..( 11): Result.006 file - promoters50/4770620
attttaaatta

SEQ ID NO: 191145 - DNA, 11 bp, Unknown
  misc_feature (1)..( 11): Result.006 file - promoters50/4770620
tctgaaaatta

SEQ ID NO: 191146 - DNA, 10 bp, Unknown
  misc_feature (1)..( 10): Result.006 file - promoters50/4770620
taaataagat

SEQ ID NO: 191147 - DNA, 10 bp, Unknown
  misc_feature (1)..( 10): Result.006 file - promoters50/4770620
aaaataatat

SEQ ID NO: 191148 - DNA, 10 bp, Unknown
  misc_feature (1)..( 10): Result.006 file - promoters50/4770620
aaaatatcaa

SEQ ID NO: 191149 - DNA, 10 bp, Unknown
  misc_feature (1)..( 10): Result.006 file - promoters50/4770620
gaaagatctg

SEQ ID NO: 191150 - DNA, 10 bp, Unknown
  misc_feature (1)..( 10): Result.006 file - promoters50/4770620
aaaatacaaa

SEQ ID NO: 191151 - DNA, 10 bp, Unknown
  misc_feature (1)..( 10): Result.006 file - promoters50/4770620
taaattacaa

SEQ ID NO: 191152 - DNA, 14 bp, Unknown
  misc_feature (1)..( 14): Result.006 file - promoters50/4770620
aacattaatataaa

SEQ ID NO: 191153 - DNA, 14 bp, Unknown
  misc_feature (1)..( 14): Result.006 file - promoters50/4770620
ttcttaaatttaaa

SEQ ID NO: 191154 - DNA, 14 bp, Unknown
  misc_feature (1)..( 14): Result.006 file - promoters50/4770620
ttacaaaatacaaa

SEQ ID NO: 191155 - DNA, 14 bp, Unknown
  misc_feature (1)..( 14): Result.006 file - promoters50/4770620
atcaatctttcaaa

SEQ ID NO: 191156 - DNA, 14 bp, Unknown
  misc_feature (1)..( 14): Result.006 file - promoters50/4770620
ttgacattttcaac

SEQ ID NO: 191157 - DNA, 14 bp, Unknown
  misc_feature (1)..( 14): Result.006 file - promoters50/4770620
tctgaaaattagga

SEQ ID NO: 191158 - DNA, 14 bp, Unknown
  misc_feature (1)..( 14): Result.006 file - promoters50/4770620
cggataaattacaa

SEQ ID NO: 191159 - DNA, 16 bp, Unknown
  misc_feature (1)..( 16): Result.006 file - promoters50/4770620
agataaattgtctccg

SEQ ID NO: 191160 - DNA, 16 bp, Unknown
  misc_feature (1)..( 16): Result.006 file - promoters50/4770620
acacaaaatgtctccg

SEQ ID NO: 191161 - DNA, 16 bp, Unknown
  misc_feature (1)..( 16): Result.006 file - promoters50/4770620
cttggatttgtctaag

SEQ ID NO: 191162 - DNA, 16 bp, Unknown
  misc_feature (1)..( 16): Result.006 file - promoters50/4770620
aagcaaattgttttct

SEQ ID NO: 191163 - DNA, 16 bp, Unknown
  misc_feature (1)..( 16): Result.006 file - promoters50/4770620
ctttaatttgtctttg

SEQ ID NO: 191164 - DNA, 16 bp, Unknown
  misc_feature (1)..( 16): Result.006 file - promoters50/4770620
acataatctccacctg

SEQ ID NO: 191165 - DNA, 10 bp, Unknown
  misc_feature (1)..( 10): Result.006 file - promoters50/4770620
attccatttc

SEQ ID NO: 191166 - DNA, 10 bp, Unknown
  misc_feature (1)..( 10): Result.006 file - promoters50/4770620
gttcccttta

SEQ ID NO: 191167 - DNA, 10 bp, Unknown
  misc_feature (1)..( 10): Result.006 file - promoters50/4770620
atttcatagt

SEQ ID NO: 191168 - DNA, 10 bp, Unknown
  misc_feature (1)..( 10): Result.006 file - promoters50/4770620
gttcgcttga

SEQ ID NO: 191169 - DNA, 10 bp, Unknown
  misc_feature (1)..( 10): Result.006 file - promoters50/4770620
tttccatttt

SEQ ID NO: 191170 - DNA, 10 bp, Unknown
  misc_feature (1)..( 10): Result.006 file - promoters50/4770624
cctacatttt

SEQ ID NO: 191171 - DNA, 13 bp, Unknown
  misc_feature (1)..( 13): Result.006 file - promoters50/4770624
aaacttaaaagta

SEQ ID NO: 191172 - DNA, 13 bp, Unknown
  misc_feature (1)..( 13): Result.006 file - promoters50/4770624
aaacataagatcc

SEQ ID NO: 191173 - DNA, 14 bp, Unknown
  misc_feature (1)..( 14): Result.006 file - promoters50/4770624
gatcttcaaattgt

SEQ ID NO: 191174 - DNA, 14 bp, Unknown
  misc_feature (1)..( 14): Result.006 file - promoters50/4770624
agttgaaaaaaata

SEQ ID NO: 191175 - DNA, 13 bp, Unknown
  misc_feature (1)..( 13): Result.006 file - promoters50/4770624
acttaaaagtaga

SEQ ID NO: 191176 - DNA, 13 bp, Unknown
  misc_feature (1)..( 13): Result.006 file - promoters50/4770624
tgaaaaaaatagc

SEQ ID NO: 191177 - DNA, 13 bp, Unknown
  misc_feature (1)..( 13): Result.006 file - promoters50/4770624
atgcaaacataag

SEQ ID NO: 191178 - DNA, 13 bp, Unknown
  misc_feature (1)..( 13): Result.006 file - promoters50/4770647
atgaaaacaaaag

SEQ ID NO: 191179 - DNA, 8 bp, Unknown
  misc_feature (1)..( 8): Result.006 file - promoters50/4770647
taagacgg

SEQ ID NO: 191180 - DNA, 8 bp, Unknown
  misc_feature (1)..( 8): Result.006 file - promoters50/4770647
taaaacgt

SEQ ID NO: 191181 - DNA, 8 bp, Unknown
  misc_feature (1)..( 8): Result.006 file - promoters50/4770651
taaaacgg

SEQ ID NO: 191182 - DNA, 9 bp, Unknown
  misc_feature (1)..( 9): Result.006 file - promoters50/4770651
ttaccaaac

SEQ ID NO: 191183 - DNA, 9 bp, Unknown
  misc_feature (1)..( 9): Result.006 file - promoters50/4770651
atacaaaac

SEQ ID NO: 191184 - DNA, 9 bp, Unknown
  misc_feature (1)..( 9): Result.006 file - promoters50/4770651
ccacaaaag

SEQ ID NO: 191185 - DNA, 9 bp, Unknown
  misc_feature (1)..( 9): Result.006 file - promoters50/4770651
atagaaaca

SEQ ID NO: 191186 - DNA, 9 bp, Unknown
  misc_feature (1)..( 9): Result.006 file - promoters50/4770651
caacatttt

SEQ ID NO: 191187 - DNA, 9 bp, Unknown
  misc_feature (1)..( 9): Result.006 file - promoters50/4770651
caatattta

SEQ ID NO: 191188 - DNA, 9 bp, Unknown
  misc_feature (1)..( 9): Result.006 file - promoters50/4770651
caaaatttt

SEQ ID NO: 191189 - DNA, 8 bp, Unknown
  misc_feature (1)..( 8): Result.006 file - promoters50/4770651
tattttgt

SEQ ID NO: 191190 - DNA, 8 bp, Unknown
  misc_feature (1)..( 8): Result.006 file - promoters50/4770651
tgttttgt

SEQ ID NO: 191191 - DNA, 8 bp, Unknown
  misc_feature (1)..( 8): Result.006 file - promoters50/4770651
tgttttga

SEQ ID NO: 191192 - DNA, 8 bp, Unknown
  misc_feature (1)..( 8): Result.006 file - promoters50/4770651
tgttttac

SEQ ID NO: 191193 - DNA, 14 bp, Unknown
  misc_feature (1)..( 14): Result.006 file - promoters50/4770651
cggcaaaatatttt

SEQ ID NO: 191194 - DNA, 14 bp, Unknown
  misc_feature (1)..( 14): Result.006 file - promoters50/4770651
aatcaaaatattat

SEQ ID NO: 191195 - DNA, 14 bp, Unknown
  misc_feature (1)..( 14): Result.006 file - promoters50/4770651
aatcaaaattttat

SEQ ID NO: 191196 - DNA, 8 bp, Unknown
  misc_feature (1)..( 8): Result.006 file - promoters50/4770651
atcgaaat

SEQ ID NO: 191197 - DNA, 8 bp, Unknown
  misc_feature (1)..( 8): Result.006 file - promoters50/4770651
atcaaaat

SEQ ID NO: 191198 - DNA, 8 bp, Unknown
  misc_feature (1)..( 8): Result.006 file - promoters50/4770651
aacaaaat

SEQ ID NO: 191199 - DNA, 9 bp, Unknown
  misc_feature (1)..( 9): Result.006 file - promoters50/4770651
tattttaac

SEQ ID NO: 191200 - DNA, 9 bp, Unknown
  misc_feature (1)..( 9): Result.006 file - promoters50/4770651
aattataac

SEQ ID NO: 191201 - DNA, 9 bp, Unknown
  misc_feature (1)..( 9): Result.006 file - promoters50/4770651
cattttttc

SEQ ID NO: 191202 - DNA, 14 bp, Unknown
  misc_feature (1)..( 14): Result.006 file - promoters50/4770651
ttttgtaatttttt

SEQ ID NO: 191203 - DNA, 14 bp, Unknown
  misc_feature (1)..( 14): Result.006 file - promoters50/4770651
aatcaaaattttat

SEQ ID NO: 191204 - DNA, 14 bp, Unknown
  misc_feature (1)..( 14): Result.006 file - promoters50/4770651
aatcaaaatattat

SEQ ID NO: 191205 - DNA, 8 bp, Unknown
  misc_feature (1)..( 8): Result.006 file - promoters50/4770651
tctcatta

SEQ ID NO: 191206 - DNA, 8 bp, Unknown
  misc_feature (1)..( 8): Result.006 file - promoters50/4770651
tctaattt

SEQ ID NO: 191207 - DNA, 8 bp, Unknown
  misc_feature (1)..( 8): Result.006 file - promoters50/4770651
actaattt

SEQ ID NO: 191208 - DNA, 10 bp, Unknown
  misc_feature (1)..( 10): Result.006 file - promoters50/4770651
attaaatccg

SEQ ID NO: 191209 - DNA, 10 bp, Unknown
  misc_feature (1)..( 10): Result.006 file - promoters50/4770651
atttaatata

SEQ ID NO: 191210 - DNA, 10 bp, Unknown
  misc_feature (1)..( 10): Result.006 file - promoters50/4770651
aattaatata

SEQ ID NO: 191211 - DNA, 9 bp, Unknown
  misc_feature (1)..( 9): Result.006 file - promoters50/4770651
ataattaaa

SEQ ID NO: 191212 - DNA, 9 bp, Unknown
  misc_feature (1)..( 9): Result.006 file - promoters50/4770651
ataatcaaa

SEQ ID NO: 191213 - DNA, 9 bp, Unknown
  misc_feature (1)..( 9): Result.006 file - promoters50/4770651
agaatcaaa

SEQ ID NO: 191214 - DNA, 10 bp, Unknown
  misc_feature (1)..( 10): Result.006 file - promoters50/4770651
caaaaattaa

SEQ ID NO: 191215 - DNA, 10 bp, Unknown
  misc_feature (1)..( 10): Result.006 file - promoters50/4770651
caaaatttat

SEQ ID NO: 191216 - DNA, 10 bp, Unknown
  misc_feature (1)..( 10): Result.006 file - promoters50/4770659
tctaatttat

SEQ ID NO: 191217 - DNA, 7 bp, Unknown
  misc_feature (1)..( 7): Result.006 file - promoters50/4770659
agtatat

SEQ ID NO: 191218 - DNA, 7 bp, Unknown
  misc_feature (1)..( 7): Result.006 file - promoters50/4770659
tgtatat

SEQ ID NO: 191219 - DNA, 7 bp, Unknown
  misc_feature (1)..( 7): Result.006 file - promoters50/4770659
agtatat

SEQ ID NO: 191220 - DNA, 10 bp, Unknown
  misc_feature (1)..( 10): Result.006 file - promoters50/4770659
aaactaagaa

SEQ ID NO: 191221 - DNA, 10 bp, Unknown
  misc_feature (1)..( 10): Result.006 file - promoters50/4770659
aaaataaata

SEQ ID NO: 191222 - DNA, 10 bp, Unknown
  misc_feature (1)..( 10): Result.006 file - promoters50/4770659
acaatagata

SEQ ID NO: 191223 - DNA, 8 bp, Unknown
  misc_feature (1)..( 8): Result.006 file - promoters50/4770659
tttagata

SEQ ID NO: 191224 - DNA, 8 bp, Unknown
  misc_feature (1)..( 8): Result.006 file - promoters50/4770659
aatagata

SEQ ID NO: 191225 - DNA, 8 bp, Unknown
  misc_feature (1)..( 8): Result.006 file - promoters50/4770666
aataaata

SEQ ID NO: 191226 - DNA, 7 bp, Unknown
  misc_feature (1)..( 7): Result.006 file - promoters50/4770666
gtggatt

SEQ ID NO: 191227 - DNA, 7 bp, Unknown
  misc_feature (1)..( 7): Result.006 file - promoters50/4770666
ttggatt

SEQ ID NO: 191228 - DNA, 7 bp, Unknown
  misc_feature (1)..( 7): Result.006 file - promoters50/4770666
ttgcatt

SEQ ID NO: 191229 - DNA, 7 bp, Unknown
  misc_feature (1)..( 7): Result.006 file - promoters50/4770666
atatttg

SEQ ID NO: 191230 - DNA, 7 bp, Unknown
  misc_feature (1)..( 7): Result.006 file - promoters50/4770666
ataattg

SEQ ID NO: 191231 - DNA, 7 bp, Unknown
  misc_feature (1)..( 7): Result.006 file - promoters50/4770880
ataattc

SEQ ID NO: 191232 - DNA, 12 bp, Unknown
  misc_feature (1)..( 12): Result.006 file - promoters50/4770880
tggcttttgcat

SEQ ID NO: 191233 - DNA, 12 bp, Unknown
  misc_feature (1)..( 12): Result.006 file - promoters50/4770880
caaatttttcat

SEQ ID NO: 191234 - DNA, 12 bp, Unknown
  misc_feature (1)..( 12): Result.006 file - promoters50/4770880
aatatttaaatc

SEQ ID NO: 191235 - DNA, 7 bp, Unknown
  misc_feature (1)..( 7): Result.006 file - promoters50/4770880
gatttta

SEQ ID NO: 191236 - DNA, 7 bp, Unknown
  misc_feature (1)..( 7): Result.006 file - promoters50/4770880
gattttt

SEQ ID NO: 191237 - DNA, 7 bp, Unknown
  misc_feature (1)..( 7): Result.006 file - promoters50/4770880
aatttta

SEQ ID NO: 191238 - DNA, 10 bp, Unknown
  misc_feature (1)..( 10): Result.006 file - promoters50/4770880
aatgagatta

SEQ ID NO: 191239 - DNA, 10 bp, Unknown
  misc_feature (1)..( 10): Result.006 file - promoters50/4770880
aatgagatca

SEQ ID NO: 191240 - DNA, 10 bp, Unknown
  misc_feature (1)..( 10): Result.006 file - promoters50/4770880
atggagctta

SEQ ID NO: 191241 - DNA, 8 bp, Unknown
  misc_feature (1)..( 8): Result.006 file - promoters50/4770880
atccatag

SEQ ID NO: 191242 - DNA, 8 bp, Unknown
  misc_feature (1)..( 8): Result.006 file - promoters50/4770880
atccatct

SEQ ID NO: 191243 - DNA, 8 bp, Unknown
  misc_feature (1)..( 8): Result.006 file - promoters50/4770880
ttccttct

SEQ ID NO: 191244 - DNA, 9 bp, Unknown
  misc_feature (1)..( 9): Result.006 file - promoters50/4770880
aactaaaga

SEQ ID NO: 191245 - DNA, 9 bp, Unknown
  misc_feature (1)..( 9): Result.006 file - promoters50/4770880
aaccaaaaa

SEQ ID NO: 191246 - DNA, 9 bp, Unknown
  misc_feature (1)..( 9): Result.006 file - promoters50/4770880
cactaaaga

SEQ ID NO: 191247 - DNA, 12 bp, Unknown
  misc_feature (1)..( 12): Result.006 file - promoters50/4770880
tgaaatgataat

SEQ ID NO: 191248 - DNA, 12 bp, Unknown
  misc_feature (1)..( 12): Result.006 file - promoters50/4770880
tgatatgtgttt

SEQ ID NO: 191249 - DNA, 12 bp, Unknown
  misc_feature (1)..( 12): Result.006 file - promoters50/4770880
ggatatgtattt

SEQ ID NO: 191250 - DNA, 8 bp, Unknown
  misc_feature (1)..( 8): Result.006 file - promoters50/4770880
ttaaattt

SEQ ID NO: 191251 - DNA, 8 bp, Unknown
  misc_feature (1)..( 8): Result.006 file - promoters50/4770880
ttaacttt

SEQ ID NO: 191252 - DNA, 8 bp, Unknown
  misc_feature (1)..( 8): Result.006 file - promoters50/4770880
ttagcttt

SEQ ID NO: 191253 - DNA, 6 bp, Unknown
  misc_feature (1)..( 6): Result.006 file - promoters50/4770880
caaatt

SEQ ID NO: 191254 - DNA, 6 bp, Unknown
  misc_feature (1)..( 6): Result.006 file - promoters50/4770880
caaatt

SEQ ID NO: 191255 - DNA, 6 bp, Unknown
  misc_feature (1)..( 6): Result.006 file - promoters50/4770880
caaatt

SEQ ID NO: 191256 - DNA, 7 bp, Unknown
  misc_feature (1)..( 7): Result.006 file - promoters50/4770880
tcatatt

SEQ ID NO: 191257 - DNA, 7 bp, Unknown
  misc_feature (1)..( 7): Result.006 file - promoters50/4770880
tcaaatt

SEQ ID NO: 191258 - DNA, 7 bp, Unknown
  misc_feature (1)..( 7): Result.006 file - promoters50/4771231
ccaaatt

SEQ ID NO: 191259 - DNA, 12 bp, Unknown
  misc_feature (1)..( 12): Result.006 file - promoters50/4771231
tttttgtttttt

SEQ ID NO: 191260 - DNA, 12 bp, Unknown
  misc_feature (1)..( 12): Result.006 file - promoters50/4771231
tttatgtttttt

SEQ ID NO: 191261 - DNA, 12 bp, Unknown
  misc_feature (1)..( 12): Result.006 file - promoters50/4771245
cgtatgtattta

SEQ ID NO: 191262 - DNA, 8 bp, Unknown
  misc_feature (1)..( 8): Result.006 file - promoters50/4771245
atatttat

SEQ ID NO: 191263 - DNA, 8 bp, Unknown
  misc_feature (1)..( 8): Result.006 file - promoters50/4771245
atatttgt

SEQ ID NO: 191264 - DNA, 8 bp, Unknown
  misc_feature (1)..( 8): Result.006 file - promoters50/4771245
gtatctgt

SEQ ID NO: 191265 - DNA, 8 bp, Unknown
  misc_feature (1)..( 8): Result.006 file - promoters50/4771245
tatcagtt

SEQ ID NO: 191266 - DNA, 8 bp, Unknown
  misc_feature (1)..( 8): Result.006 file - promoters50/4771245
tatctgtt

SEQ ID NO: 191267 - DNA, 8 bp, Unknown
  misc_feature (1)..( 8): Result.006 file - promoters50/4771252
tatttgta

SEQ ID NO: 191268 - DNA, 10 bp, Unknown
  misc_feature (1)..( 10): Result.006 file - promoters50/4771252
taaggagaaa

SEQ ID NO: 191269 - DNA, 10 bp, Unknown
  misc_feature (1)..( 10): Result.006 file - promoters50/4771252
aaaggataaa

SEQ ID NO: 191270 - DNA, 10 bp, Unknown
  misc_feature (1)..( 10): Result.006 file - promoters50/4771255
aaagaataat

SEQ ID NO: 191271 - DNA, 8 bp, Unknown
  misc_feature (1)..( 8): Result.006 file - promoters50/4771255
tttgttga

SEQ ID NO: 191272 - DNA, 8 bp, Unknown
  misc_feature (1)..( 8): Result.006 file - promoters50/4771255
tttgatga

SEQ ID NO: 191273 - DNA, 8 bp, Unknown
  misc_feature (1)..( 8): Result.006 file - promoters50/4771255
tttgttta

SEQ ID NO: 191274 - DNA, 14 bp, Unknown
  misc_feature (1)..( 14): Result.006 file - promoters50/4771255
attttgtctctttc

SEQ ID NO: 191275 - DNA, 14 bp, Unknown
  misc_feature (1)..( 14): Result.006 file - promoters50/4771255
attttatctttttc

SEQ ID NO: 191276 - DNA, 14 bp, Unknown
  misc_feature (1)..( 14): Result.006 file - promoters50/4771255
attttaaagttatc

SEQ ID NO: 191277 - DNA, 12 bp, Unknown
  misc_feature (1)..( 12): Result.006 file - promoters50/4771255
ctttattttaat

SEQ ID NO: 191278 - DNA, 12 bp, Unknown
  misc_feature (1)..( 12): Result.006 file - promoters50/4771255
tcttatttcaat

SEQ ID NO: 191279 - DNA, 12 bp, Unknown
  misc_feature (1)..( 12): Result.006 file - promoters50/4771271
tctgattaaatc

SEQ ID NO: 191280 - DNA, 10 bp, Unknown
  misc_feature (1)..( 10): Result.006 file - promoters50/4771271
gtattattag

SEQ ID NO: 191281 - DNA, 10 bp, Unknown
  misc_feature (1)..( 10): Result.006 file - promoters50/4771271
ttataattat

SEQ ID NO: 191282 - DNA, 10 bp, Unknown
  misc_feature (1)..( 10): Result.006 file - promoters50/4771271
attggattaa

SEQ ID NO: 191283 - DNA, 10 bp, Unknown
  misc_feature (1)..( 10): Result.006 file - promoters50/4771271
ctatgatttc

SEQ ID NO: 191284 - DNA, 10 bp, Unknown
  misc_feature (1)..( 10): Result.006 file - promoters50/4771271
gtattattat

SEQ ID NO: 191285 - DNA, 10 bp, Unknown
  misc_feature (1)..( 10): Result.006 file - promoters50/4771278
ttataaggcc

SEQ ID NO: 191286 - DNA, 10 bp, Unknown
  misc_feature (1)..( 10): Result.006 file - promoters50/4771278
aaaatcgaca

SEQ ID NO: 191287 - DNA, 10 bp, Unknown
  misc_feature (1)..( 10): Result.006 file - promoters50/4771278
aaaatcacta

SEQ ID NO: 191288 - DNA, 10 bp, Unknown
  misc_feature (1)..( 10): Result.006 file - promoters50/4771282
caaatcgaca

SEQ ID NO: 191289 - DNA, 9 bp, Unknown
  misc_feature (1)..( 9): Result.006 file - promoters50/4771282
tattctcta

SEQ ID NO: 191290 - DNA, 9 bp, Unknown
  misc_feature (1)..( 9): Result.006 file - promoters50/4771282
tattcttac

SEQ ID NO: 191291 - DNA, 9 bp, Unknown
  misc_feature (1)..( 9): Result.006 file - promoters50/4771286
aatttttac

SEQ ID NO: 191292 - DNA, 8 bp, Unknown
  misc_feature (1)..( 8): Result.006 file - promoters50/4771286
actataaa

SEQ ID NO: 191293 - DNA, 8 bp, Unknown
  misc_feature (1)..( 8): Result.006 file - promoters50/4771286
tttataaa

SEQ ID NO: 191294 - DNA, 8 bp, Unknown
  misc_feature (1)..( 8): Result.006 file - promoters50/4771286
tatataaa

SEQ ID NO: 191295 - DNA, 8 bp, Unknown
  misc_feature (1)..( 8): Result.006 file - promoters50/4771286
tatataaa

SEQ ID NO: 191296 - DNA, 8 bp, Unknown
  misc_feature (1)..( 8): Result.006 file - promoters50/4771286
tatataat

SEQ ID NO: 191297 - DNA, 8 bp, Unknown
  misc_feature (1)..( 8): Result.006 file - promoters50/4771286
tatataaa

SEQ ID NO: 191298 - DNA, 8 bp, Unknown
  misc_feature (1)..( 8): Result.006 file - promoters50/4771286
tatataaa

SEQ ID NO: 191299 - DNA, 8 bp, Unknown
  misc_feature (1)..( 8): Result.006 file - promoters50/4771286
catatata

SEQ ID NO: 191300 - DNA, 11 bp, Unknown
  misc_feature (1)..( 11): Result.006 file - promoters50/4771286
tcattttaaat

SEQ ID NO: 191301 - DNA, 11 bp, Unknown
  misc_feature (1)..( 11): Result.006 file - promoters50/4771286
aattttgaaag

SEQ ID NO: 191302 - DNA, 11 bp, Unknown
  misc_feature (1)..( 11): Result.006 file - promoters50/4771286
tagtttgaatc

SEQ ID NO: 191303 - DNA, 12 bp, Unknown
  misc_feature (1)..( 12): Result.006 file - promoters50/4771286
taagcattaaat

SEQ ID NO: 191304 - DNA, 11 bp, Unknown
  misc_feature (1)..( 11): Result.006 file - promoters50/4771286
aattttgatga

SEQ ID NO: 191305 - DNA, 12 bp, Unknown
  misc_feature (1)..( 12): Result.006 file - promoters50/4771286
acctttcgatgt

SEQ ID NO: 191306 - DNA, 20 bp, Unknown
  misc_feature (1)..( 20): Result.006 file - promoters50/4771286
gttaaactgttagtgcaagc

SEQ ID NO: 191307 - DNA, 20 bp, Unknown
  misc_feature (1)..( 20): Result.006 file - promoters50/4771286
ataaaaatgttagataggaa

SEQ ID NO: 191308 - DNA, 20 bp, Unknown
  misc_feature (1)..( 20): Result.006 file - promoters50/4771286
tcataaattttaaaattatt

SEQ ID NO: 191309 - DNA, 20 bp, Unknown
  misc_feature (1)..( 20): Result.006 file - promoters50/4771286
atataaatacgaccaaaaaa

SEQ ID NO: 191310 - DNA, 20 bp, Unknown
  misc_feature (1)..( 20): Result.006 file - promoters50/4771286
ttacttgtgttaaatatgaa

SEQ ID NO: 191311 - DNA, 20 bp, Unknown
  misc_feature (1)..( 20): Result.006 file - promoters50/4771286
aagcccattataaatacata

SEQ ID NO: 191312 - DNA, 20 bp, Unknown
  misc_feature (1)..( 20): Result.006 file - promoters50/4771286
aaatagatttgaaaaacaga

SEQ ID NO: 191313 - DNA, 18 bp, Unknown
  misc_feature (1)..( 18): Result.006 file - promoters50/4771286
tcatcgatcctcgtcaac

SEQ ID NO: 191314 - DNA, 18 bp, Unknown
  misc_feature (1)..( 18): Result.006 file - promoters50/4771286
tcacgcatccgcgtttca

SEQ ID NO: 191315 - DNA, 18 bp, Unknown
  misc_feature (1)..( 18): Result.006 file - promoters50/4771286
tcatcaatcctcgtgaaa

SEQ ID NO: 191316 - DNA, 18 bp, Unknown
  misc_feature (1)..( 18): Result.006 file - promoters50/4771286
acagcgatccgcgtagtt

SEQ ID NO: 191317 - DNA, 18 bp, Unknown
  misc_feature (1)..( 18): Result.006 file - promoters50/4771286
acatcgatccgcgtgatt

SEQ ID NO: 191318 - DNA, 18 bp, Unknown
  misc_feature (1)..( 18): Result.006 file - promoters50/4771286
ttcacccggatcgttatc

SEQ ID NO: 191319 - DNA, 8 bp, Unknown
  misc_feature (1)..( 8): Result.006 file - promoters50/4771286
atatatat

SEQ ID NO: 191320 - DNA, 8 bp, Unknown
  misc_feature (1)..( 8): Result.006 file - promoters50/4771286
atacataa

SEQ ID NO: 191321 - DNA, 8 bp, Unknown
  misc_feature (1)..( 8): Result.006 file - promoters50/4771286
atagattt

SEQ ID NO: 191322 - DNA, 8 bp, Unknown
  misc_feature (1)..( 8): Result.006 file - promoters50/4771286
ataaattt

SEQ ID NO: 191323 - DNA, 8 bp, Unknown
  misc_feature (1)..( 8): Result.006 file - promoters50/4771286
aaaaagag

SEQ ID NO: 191324 - DNA, 8 bp, Unknown
  misc_feature (1)..( 8): Result.006 file - promoters50/4771325
taagattt

SEQ ID NO: 191325 - DNA, 7 bp, Unknown
  misc_feature (1)..( 7): Result.006 file - promoters50/4771325
gaaaaaa

SEQ ID NO: 191326 - DNA, 7 bp, Unknown
  misc_feature (1)..( 7): Result.006 file - promoters50/4771325
gaagaaa

SEQ ID NO: 191327 - DNA, 7 bp, Unknown
  misc_feature (1)..( 7): Result.006 file - promoters50/4771325
caaaaaa

SEQ ID NO: 191328 - DNA, 7 bp, Unknown
  misc_feature (1)..( 7): Result.006 file - promoters50/4771325
aagaaag

SEQ ID NO: 191329 - DNA, 7 bp, Unknown
  misc_feature (1)..( 7): Result.006 file - promoters50/4771325
aagaaat

SEQ ID NO: 191330 - DNA, 7 bp, Unknown
  misc_feature (1)..( 7): Result.006 file - promoters50/4771325
gagaaat

SEQ ID NO: 191331 - DNA, 12 bp, Unknown
  misc_feature (1)..( 12): Result.006 file - promoters50/4771325
atatttgtattg

SEQ ID NO: 191332 - DNA, 12 bp, Unknown
  misc_feature (1)..( 12): Result.006 file - promoters50/4771325
tcatttgcattg

SEQ ID NO: 191333 - DNA, 12 bp, Unknown
  misc_feature (1)..( 12): Result.006 file - promoters50/4771325
atatttgacagc

SEQ ID NO: 191334 - DNA, 9 bp, Unknown
  misc_feature (1)..( 9): Result.006 file - promoters50/4771325
ttttaattg

SEQ ID NO: 191335 - DNA, 9 bp, Unknown
  misc_feature (1)..( 9): Result.006 file - promoters50/4771325
gtttagttg

SEQ ID NO: 191336 - DNA, 9 bp, Unknown
  misc_feature (1)..( 9): Result.006 file - promoters50/4771330
gttttgttc

SEQ ID NO: 191337 - DNA, 10 bp, Unknown
  misc_feature (1)..( 10): Result.006 file - promoters50/4771330
aagaggaaga

SEQ ID NO: 191338 - DNA, 10 bp, Unknown
  misc_feature (1)..( 10): Result.006 file - promoters50/4771330
ctgaggaaag

SEQ ID NO: 191339 - DNA, 10 bp, Unknown
  misc_feature (1)..( 10): Result.006 file - promoters50/4771330
aggatgaaga

SEQ ID NO: 191340 - DNA, 6 bp, Unknown
  misc_feature (1)..( 6): Result.006 file - promoters50/4771330
gaagag

SEQ ID NO: 191341 - DNA, 6 bp, Unknown
  misc_feature (1)..( 6): Result.006 file - promoters50/4771330
gaagag

SEQ ID NO: 191342 - DNA, 6 bp, Unknown
  misc_feature (1)..( 6): Result.006 file - promoters50/4771330
gaagag

SEQ ID NO: 191343 - DNA, 10 bp, Unknown
  misc_feature (1)..( 10): Result.006 file - promoters50/4771330
gagaggcttg

SEQ ID NO: 191344 - DNA, 10 bp, Unknown
  misc_feature (1)..( 10): Result.006 file - promoters50/4771330
aagaggattg

SEQ ID NO: 191345 - DNA, 10 bp, Unknown
  misc_feature (1)..( 10): Result.006 file - promoters50/4771330
aagatgatgt

SEQ ID NO: 191346 - DNA, 9 bp, Unknown
  misc_feature (1)..( 9): Result.006 file - promoters50/4771330
aaaaagagt

SEQ ID NO: 191347 - DNA, 9 bp, Unknown
  misc_feature (1)..( 9): Result.006 file - promoters50/4771330
aaaaaggcc

SEQ ID NO: 191348 - DNA, 9 bp, Unknown
  misc_feature (1)..( 9): Result.006 file - promoters50/4771334
ttaaaggag

SEQ ID NO: 191349 - DNA, 11 bp, Unknown
  misc_feature (1)..( 11): Result.006 file - promoters50/4771334
taaaaaatatt

SEQ ID NO: 191350 - DNA, 11 bp, Unknown
  misc_feature (1)..( 11): Result.006 file - promoters50/4771334
caaagaataaa

SEQ ID NO: 191351 - DNA, 11 bp, Unknown
  misc_feature (1)..( 11): Result.006 file - promoters50/4771334
caaaacatata

SEQ ID NO: 191352 - DNA, 11 bp, Unknown
  misc_feature (1)..( 11): Result.006 file - promoters50/4771334
taaaaaagtgt

SEQ ID NO: 191353 - DNA, 11 bp, Unknown
  misc_feature (1)..( 11): Result.006 file - promoters50/4771334
taataaatttt

SEQ ID NO: 191354 - DNA, 11 bp, Unknown
  misc_feature (1)..( 11): Result.006 file - promoters50/4771334
cagaaaatatt

SEQ ID NO: 191355 - DNA, 11 bp, Unknown
  misc_feature (1)..( 11): Result.006 file - promoters50/4771334
aaaaaaaaaag

SEQ ID NO: 191356 - DNA, 18 bp, Unknown
  misc_feature (1)..( 18): Result.006 file - promoters50/4771334
gtgcttccaacaaatgca

SEQ ID NO: 191357 - DNA, 18 bp, Unknown
  misc_feature (1)..( 18): Result.006 file - promoters50/4771334
ttgcttctcccaagcgat

SEQ ID NO: 191358 - DNA, 18 bp, Unknown
  misc_feature (1)..( 18): Result.006 file - promoters50/4771334
gtgcttcaaacaaaacta

SEQ ID NO: 191359 - DNA, 18 bp, Unknown
  misc_feature (1)..( 18): Result.006 file - promoters50/4771334
catcttcaaaattatatc

SEQ ID NO: 191360 - DNA, 18 bp, Unknown
  misc_feature (1)..( 18): Result.006 file - promoters50/4771334
ctatttcaaaaatactta

SEQ ID NO: 191361 - DNA, 18 bp, Unknown
  misc_feature (1)..( 18): Result.006 file - promoters50/4771348
atcagctgaacacaacta

SEQ ID NO: 191362 - DNA, 7 bp, Unknown
  misc_feature (1)..( 7): Result.006 file - promoters50/4771348
acactgt

SEQ ID NO: 191363 - DNA, 7 bp, Unknown
  misc_feature (1)..( 7): Result.006 file - promoters50/4771348
acattgt

SEQ ID NO: 191364 - DNA, 7 bp, Unknown
  misc_feature (1)..( 7): Result.006 file - promoters50/4771348
actctca

SEQ ID NO: 191365 - DNA, 8 bp, Unknown
  misc_feature (1)..( 8): Result.006 file - promoters50/4771348
tgtcttta

SEQ ID NO: 191366 - DNA, 8 bp, Unknown
  misc_feature (1)..( 8): Result.006 file - promoters50/4771348
tgtctttc

SEQ ID NO: 191367 - DNA, 8 bp, Unknown
  misc_feature (1)..( 8): Result.006 file - promoters50/4771348
cgtcatta

SEQ ID NO: 191368 - DNA, 10 bp, Unknown
  misc_feature (1)..( 10): Result.006 file - promoters50/4771348
catttgtaga

SEQ ID NO: 191369 - DNA, 10 bp, Unknown
  misc_feature (1)..( 10): Result.006 file - promoters50/4771348
gattagtaaa

SEQ ID NO: 191370 - DNA, 10 bp, Unknown
  misc_feature (1)..( 10): Result.006 file - promoters50/4771348
cattggtact

SEQ ID NO: 191371 - DNA, 10 bp, Unknown
  misc_feature (1)..( 10): Result.006 file - promoters50/4771348
ttctagtaaa

SEQ ID NO: 191372 - DNA, 8 bp, Unknown
  misc_feature (1)..( 8): Result.006 file - promoters50/4771348
caacattt

SEQ ID NO: 191373 - DNA, 8 bp, Unknown
  misc_feature (1)..( 8): Result.006 file - promoters50/4771348
caacattg

SEQ ID NO: 191374 - DNA, 9 bp, Unknown
  misc_feature (1)..( 9): Result.006 file - promoters50/4771348
taacacttt

SEQ ID NO: 191375 - DNA, 9 bp, Unknown
  misc_feature (1)..( 9): Result.006 file - promoters50/4771348
tttggttca

SEQ ID NO: 191376 - DNA, 9 bp, Unknown
  misc_feature (1)..( 9): Result.006 file - promoters50/4771348
tttagttat

SEQ ID NO: 191377 - DNA, 9 bp, Unknown
  misc_feature (1)..( 9): Result.006 file - promoters50/4771348
cttatttat

SEQ ID NO: 191378 - DNA, 10 bp, Unknown
  misc_feature (1)..( 10): Result.006 file - promoters50/4771348
tagtaaatgg

SEQ ID NO: 191379 - DNA, 10 bp, Unknown
  misc_feature (1)..( 10): Result.006 file - promoters50/4771348
tagtaaatgg

SEQ ID NO: 191380 - DNA, 10 bp, Unknown
  misc_feature (1)..( 10): Result.006 file - promoters50/4771360
tagtaaaaaa

SEQ ID NO: 191381 - DNA, 15 bp, Unknown
  misc_feature (1)..( 15): Result.006 file - promoters50/4771360
ggaaaaaacatatat

SEQ ID NO: 191382 - DNA, 15 bp, Unknown
  misc_feature (1)..( 15): Result.006 file - promoters50/4771360
agaaaaatggatttc

SEQ ID NO: 191383 - DNA, 15 bp, Unknown
  misc_feature (1)..( 15): Result.006 file - promoters50/4771360
ggaaaaaacaatttg

SEQ ID NO: 191384 - DNA, 15 bp, Unknown
  misc_feature (1)..( 15): Result.006 file - promoters50/4771360
ggaacaaaggagcac

SEQ ID NO: 191385 - DNA, 15 bp, Unknown
  misc_feature (1)..( 15): Result.006 file - promoters50/4771360
ccaaaaaaaaacaat

SEQ ID NO: 191386 - DNA, 15 bp, Unknown
  misc_feature (1)..( 15): Result.006 file - promoters50/4771360
agagaaattgatttc

SEQ ID NO: 191387 - DNA, 13 bp, Unknown
  misc_feature (1)..( 13): Result.006 file - promoters50/4771360
aaaatgttcactt

SEQ ID NO: 191388 - DNA, 13 bp, Unknown
  misc_feature (1)..( 13): Result.006 file - promoters50/4771360
taaatgttaaaaa

SEQ ID NO: 191389 - DNA, 14 bp, Unknown
  misc_feature (1)..( 14): Result.006 file - promoters50/4771360
aaacatgtttacaa

SEQ ID NO: 191390 - DNA, 14 bp, Unknown
  misc_feature (1)..( 14): Result.006 file - promoters50/4771360
tataatcttaactt

SEQ ID NO: 191391 - DNA, 14 bp, Unknown
  misc_feature (1)..( 14): Result.006 file - promoters50/4771360
gtttttctgaactt

SEQ ID NO: 191392 - DNA, 14 bp, Unknown
  misc_feature (1)..( 14): Result.006 file - promoters50/4771360
gagaatctgaaatc

SEQ ID NO: 191393 - DNA, 14 bp, Unknown
  misc_feature (1)..( 14): Result.006 file - promoters50/4771360
ccaaaaaaaagtct

SEQ ID NO: 191394 - DNA, 14 bp, Unknown
  misc_feature (1)..( 14): Result.006 file - promoters50/4771360
aaaaataaaagtta

SEQ ID NO: 191395 - DNA, 14 bp, Unknown
  misc_feature (1)..( 14): Result.006 file - promoters50/4771360
ccaacaaagttgtt

SEQ ID NO: 191396 - DNA, 14 bp, Unknown
  misc_feature (1)..( 14): Result.006 file - promoters50/4771360
cacaatataagtta

SEQ ID NO: 191397 - DNA, 14 bp, Unknown
  misc_feature (1)..( 14): Result.006 file - promoters50/4771360
actaatataaataa

SEQ ID NO: 191398 - DNA, 14 bp, Unknown
  misc_feature (1)..( 14): Result.006 file - promoters50/4771360
caaacgaaggagac

SEQ ID NO: 191399 - DNA, 14 bp, Unknown
  misc_feature (1)..( 14): Result.006 file - promoters50/4771364
cccaatatacttat

SEQ ID NO: 191400 - DNA, 9 bp, Unknown
  misc_feature (1)..( 9): Result.006 file - promoters50/4771364
ggtttaaca

SEQ ID NO: 191401 - DNA, 9 bp, Unknown
  misc_feature (1)..( 9): Result.006 file - promoters50/4771364
actttgaca

SEQ ID NO: 191402 - DNA, 9 bp, Unknown
  misc_feature (1)..( 9): Result.006 file - promoters50/4771364
actttgatc

SEQ ID NO: 191403 - DNA, 10 bp, Unknown
  misc_feature (1)..( 10): Result.006 file - promoters50/4771364
atggaccaaa

SEQ ID NO: 191404 - DNA, 10 bp, Unknown
  misc_feature (1)..( 10): Result.006 file - promoters50/4771364
tttgacaaaa

SEQ ID NO: 191405 - DNA, 10 bp, Unknown
  misc_feature (1)..( 10): Result.006 file - promoters50/4771372
atgggccaag

SEQ ID NO: 191406 - DNA, 12 bp, Unknown
  misc_feature (1)..( 12): Result.006 file - promoters50/4771372
tagtgacatcta

SEQ ID NO: 191407 - DNA, 12 bp, Unknown
  misc_feature (1)..( 12): Result.006 file - promoters50/4771372
tcttgagatctc

SEQ ID NO: 191408 - DNA, 12 bp, Unknown
  misc_feature (1)..( 12): Result.006 file - promoters50/4771372
cggcatcatcta

SEQ ID NO: 191409 - DNA, 12 bp, Unknown
  misc_feature (1)..( 12): Result.006 file - promoters50/4771372
cgatgagatgag

SEQ ID NO: 191410 - DNA, 12 bp, Unknown
  misc_feature (1)..( 12): Result.006 file - promoters50/4771372
cgaggagaaaag

SEQ ID NO: 191411 - DNA, 12 bp, Unknown
  misc_feature (1)..( 12): Result.006 file - promoters50/4771404
gaatgagaagta

SEQ ID NO: 191412 - DNA, 9 bp, Unknown
  misc_feature (1)..( 9): Result.006 file - promoters50/4771404
taatagaat

SEQ ID NO: 191413 - DNA, 9 bp, Unknown
  misc_feature (1)..( 9): Result.006 file - promoters50/4771404
aaatcgaat

SEQ ID NO: 191414 - DNA, 9 bp, Unknown
  misc_feature (1)..( 9): Result.006 file - promoters50/4771407
taaaagaat

SEQ ID NO: 191415 - DNA, 13 bp, Unknown
  misc_feature (1)..( 13): Result.006 file - promoters50/4771407
taaaataacgttt

SEQ ID NO: 191416 - DNA, 13 bp, Unknown
  misc_feature (1)..( 13): Result.006 file - promoters50/4771407
tgaaataattaat

SEQ ID NO: 191417 - DNA, 14 bp, Unknown
  misc_feature (1)..( 14): Result.006 file - promoters50/4771407
taaaagtaaatcat

SEQ ID NO: 191418 - DNA, 14 bp, Unknown
  misc_feature (1)..( 14): Result.006 file - promoters50/4771407
ttgaactaatgaga

SEQ ID NO: 191419 - DNA, 14 bp, Unknown
  misc_feature (1)..( 14): Result.006 file - promoters50/4771407
acaatctaattaga

SEQ ID NO: 191420 - DNA, 14 bp, Unknown
  misc_feature (1)..( 14): Result.006 file - promoters50/4771407
gtcatccaattttg

SEQ ID NO: 191421 - DNA, 13 bp, Unknown
  misc_feature (1)..( 13): Result.006 file - promoters50/4771407
tattttaatgtgg

SEQ ID NO: 191422 - DNA, 13 bp, Unknown
  misc_feature (1)..( 13): Result.006 file - promoters50/4771407
gtttttcatggaa

SEQ ID NO: 191423 - DNA, 13 bp, Unknown
  misc_feature (1)..( 13): Result.006 file - promoters50/4771407
tgtttacatatac

SEQ ID NO: 191424 - DNA, 13 bp, Unknown
  misc_feature (1)..( 13): Result.006 file - promoters50/4771407
tgttgacaaatgt

SEQ ID NO: 191425 - DNA, 13 bp, Unknown
  misc_feature (1)..( 13): Result.006 file - promoters50/4771407
tattctcaaggaa

SEQ ID NO: 191426 - DNA, 13 bp, Unknown
  misc_feature (1)..( 13): Result.006 file - promoters50/4771410
tgtagactctaaa

SEQ ID NO: 191427 - DNA, 10 bp, Unknown
  misc_feature (1)..( 10): Result.006 file - promoters50/4771410
taacttttga

SEQ ID NO: 191428 - DNA, 10 bp, Unknown
  misc_feature (1)..( 10): Result.006 file - promoters50/4771410
ttacttttaa

SEQ ID NO: 191429 - DNA, 10 bp, Unknown
  misc_feature (1)..( 10): Result.006 file - promoters50/4771410
cttcttttga

SEQ ID NO: 191430 - DNA, 10 bp, Unknown
  misc_feature (1)..( 10): Result.006 file - promoters50/4771410
taaatttttt

SEQ ID NO: 191431 - DNA, 10 bp, Unknown
  misc_feature (1)..( 10): Result.006 file - promoters50/4771410
attctttttg

SEQ ID NO: 191432 - DNA, 10 bp, Unknown
  misc_feature (1)..( 10): Result.006 file - promoters50/4771410
ttcctttttg

SEQ ID NO: 191433 - DNA, 10 bp, Unknown
  misc_feature (1)..( 10): Result.006 file - promoters50/4771410
agaatttttg

SEQ ID NO: 191434 - DNA, 10 bp, Unknown
  misc_feature (1)..( 10): Result.006 file - promoters50/4771410
atcatttttt

SEQ ID NO: 191435 - DNA, 13 bp, Unknown
  misc_feature (1)..( 13): Result.006 file - promoters50/4771410
acactaactaact

SEQ ID NO: 191436 - DNA, 13 bp, Unknown
  misc_feature (1)..( 13): Result.006 file - promoters50/4771410
attttaactacaa

SEQ ID NO: 191437 - DNA, 13 bp, Unknown
  misc_feature (1)..( 13): Result.006 file - promoters50/4771410
atttttactttta

SEQ ID NO: 191438 - DNA, 13 bp, Unknown
  misc_feature (1)..( 13): Result.006 file - promoters50/4771410
gtttttatttctt

SEQ ID NO: 191439 - DNA, 13 bp, Unknown
  misc_feature (1)..( 13): Result.006 file - promoters50/4771410
gttgttactttta

SEQ ID NO: 191440 - DNA, 13 bp, Unknown
  misc_feature (1)..( 13): Result.006 file - promoters50/4771410
ttttttaaaacac

SEQ ID NO: 191441 - DNA, 15 bp, Unknown
  misc_feature (1)..( 15): Result.006 file - promoters50/4771410
tgtgaaagttggtta

SEQ ID NO: 191442 - DNA, 15 bp, Unknown
  misc_feature (1)..( 15): Result.006 file - promoters50/4771410
tttgaaagttttccc

SEQ ID NO: 191443 - DNA, 15 bp, Unknown
  misc_feature (1)..( 15): Result.006 file - promoters50/4771410
gaaaaaaattgtaat

SEQ ID NO: 191444 - DNA, 15 bp, Unknown
  misc_feature (1)..( 15): Result.006 file - promoters50/4771410
tataaaaatttttct

SEQ ID NO: 191445 - DNA, 15 bp, Unknown
  misc_feature (1)..( 15): Result.006 file - promoters50/4771410
gaagaaaaaaaaaat

SEQ ID NO: 191446 - DNA, 15 bp, Unknown
  misc_feature (1)..( 15): Result.006 file - promoters50/4771410
ttttaaataccatca

SEQ ID NO: 191447 - DNA, 12 bp, Unknown
  misc_feature (1)..( 12): Result.006 file - promoters50/4771410
agcccaatagag

SEQ ID NO: 191448 - DNA, 12 bp, Unknown
  misc_feature (1)..( 12): Result.006 file - promoters50/4771410
gacccaattaaa

SEQ ID NO: 191449 - DNA, 12 bp, Unknown
  misc_feature (1)..( 12): Result.006 file - promoters50/4771410
ggcccaacaaga

SEQ ID NO: 191450 - DNA, 12 bp, Unknown
  misc_feature (1)..( 12): Result.006 file - promoters50/4771410
aacccaaacaac

SEQ ID NO: 191451 - DNA, 12 bp, Unknown
  misc_feature (1)..( 12): Result.006 file - promoters50/4771410
ggcccattgttt

SEQ ID NO: 191452 - DNA, 12 bp, Unknown
  misc_feature (1)..( 12): Result.006 file - promoters50/4771422
tatgcaaagcca

SEQ ID NO: 191453 - DNA, 8 bp, Unknown
  misc_feature (1)..( 8): Result.006 file - promoters50/4771422
tcttagtt

SEQ ID NO: 191454 - DNA, 8 bp, Unknown
  misc_feature (1)..( 8): Result.006 file - promoters50/4771422
ttttagtt

SEQ ID NO: 191455 - DNA, 9 bp, Unknown
  misc_feature (1)..( 9): Result.006 file - promoters50/4771422
ttttgagtt

SEQ ID NO: 191456 - DNA, 8 bp, Unknown
  misc_feature (1)..( 8): Result.006 file - promoters50/4771422
aaatgaaa

SEQ ID NO: 191457 - DNA, 8 bp, Unknown
  misc_feature (1)..( 8): Result.006 file - promoters50/4771422
aaatgaat

SEQ ID NO: 191458 - DNA, 8 bp, Unknown
  misc_feature (1)..( 8): Result.006 file - promoters50/4771426
taatgaaa

SEQ ID NO: 191459 - DNA, 14 bp, Unknown
  misc_feature (1)..( 14): Result.006 file - promoters50/4771426
cctattacaatatt

SEQ ID NO: 191460 - DNA, 14 bp, Unknown
  misc_feature (1)..( 14): Result.006 file - promoters50/4771426
caaattacaatatg

SEQ ID NO: 191461 - DNA, 14 bp, Unknown
  misc_feature (1)..( 14): Result.006 file - promoters50/4771426
aaccttacaaaatt

SEQ ID NO: 191462 - DNA, 14 bp, Unknown
  misc_feature (1)..( 14): Result.006 file - promoters50/4771426
caagttaccaaata

SEQ ID NO: 191463 - DNA, 14 bp, Unknown
  misc_feature (1)..( 14): Result.006 file - promoters50/4771426
gataggataaaatt

SEQ ID NO: 191464 - DNA, 25 bp, Unknown
  misc_feature (1)..( 25): Result.006 file - promoters50/4771426
aaagttgctacaaattatagattct

SEQ ID NO: 191465 - DNA, 25 bp, Unknown
  misc_feature (1)..( 25): Result.006 file - promoters50/4771426
aaagttgcttcaaattatagattct

SEQ ID NO: 191466 - DNA, 25 bp, Unknown
  misc_feature (1)..( 25): Result.006 file - promoters50/4771426
gagtttgctagcatcaataatcaca

SEQ ID NO: 191467 - DNA, 25 bp, Unknown
  misc_feature (1)..( 25): Result.006 file - promoters50/4771426
ctggactaaaacaattgtagtggta

SEQ ID NO: 191468 - DNA, 25 bp, Unknown
  misc_feature (1)..( 25): Result.006 file - promoters50/4771426
tcttctcttttctattcttttaccc

SEQ ID NO: 191469 - DNA, 22 bp, Unknown
  misc_feature (1)..( 22): Result.006 file - promoters50/4771426
tcttttctgatattgtttctca

SEQ ID NO: 191470 - DNA, 22 bp, Unknown
  misc_feature (1)..( 22): Result.006 file - promoters50/4771426
tcttttctgattttgtttctca

SEQ ID NO: 191471 - DNA, 22 bp, Unknown
  misc_feature (1)..( 22): Result.006 file - promoters50/4771426
tatttttgaaaaaaactaatat

SEQ ID NO: 191472 - DNA, 22 bp, Unknown
  misc_feature (1)..( 22): Result.006 file - promoters50/4771426
ggtttgctgtttgcagattttt

SEQ ID NO: 191473 - DNA, 23 bp, Unknown
  misc_feature (1)..( 23): Result.006 file - promoters50/4771426
tcttattttgagaggtcggctct

SEQ ID NO: 191474 - DNA, 7 bp, Unknown
  misc_feature (1)..( 7): Result.006 file - promoters50/4771426
aaatata

SEQ ID NO: 191475 - DNA, 7 bp, Unknown
  misc_feature (1)..( 7): Result.006 file - promoters50/4771426
aaatata

SEQ ID NO: 191476 - DNA, 7 bp, Unknown
  misc_feature (1)..( 7): Result.006 file - promoters50/4771426
aaacata

SEQ ID NO: 191477 - DNA, 7 bp, Unknown
  misc_feature (1)..( 7): Result.006 file - promoters50/4771426
aaatata

SEQ ID NO: 191478 - DNA, 11 bp, Unknown
  misc_feature (1)..( 11): Result.006 file - promoters50/4771426
gattcttttga

SEQ ID NO: 191479 - DNA, 11 bp, Unknown
  misc_feature (1)..( 11): Result.006 file - promoters50/4771426
tcttattttga

SEQ ID NO: 191480 - DNA, 11 bp, Unknown
  misc_feature (1)..( 11): Result.006 file - promoters50/4771426
ggtatttttga

SEQ ID NO: 191481 - DNA, 11 bp, Unknown
  misc_feature (1)..( 11): Result.006 file - promoters50/4771426
tctgattttgt

SEQ ID NO: 191482 - DNA, 11 bp, Unknown
  misc_feature (1)..( 11): Result.006 file - promoters50/4771426
aaataaaatat

SEQ ID NO: 191483 - DNA, 11 bp, Unknown
  misc_feature (1)..( 11): Result.006 file - promoters50/4771426
ggataaaattg

SEQ ID NO: 191484 - DNA, 11 bp, Unknown
  misc_feature (1)..( 11): Result.006 file - promoters50/4771426
aaattaaacct

SEQ ID NO: 191485 - DNA, 11 bp, Unknown
  misc_feature (1)..( 11): Result.006 file - promoters50/4771426
caataatattc

SEQ ID NO: 191486 - DNA, 11 bp, Unknown
  misc_feature (1)..( 11): Result.006 file - promoters50/4771426
aactaatattg

SEQ ID NO: 191487 - DNA, 12 bp, Unknown
  misc_feature (1)..( 12): Result.006 file - promoters50/4771426
ctcaaataaaat

SEQ ID NO: 191488 - DNA, 12 bp, Unknown
  misc_feature (1)..( 12): Result.006 file - promoters50/4771426
attaaaaaaatc

SEQ ID NO: 191489 - DNA, 12 bp, Unknown
  misc_feature (1)..( 12): Result.006 file - promoters50/4771426
cttgtataaaaa

SEQ ID NO: 191490 - DNA, 12 bp, Unknown
  misc_feature (1)..( 12): Result.006 file - promoters50/4771426
aaaaaataaaaa

SEQ ID NO: 191491 - DNA, 12 bp, Unknown
  misc_feature (1)..( 12): Result.006 file - promoters50/4771426
attttttaaaaa

SEQ ID NO: 191492 - DNA, 11 bp, Unknown
  misc_feature (1)..( 11): Result.006 file - promoters50/4771426
aaaaataaaaa

SEQ ID NO: 191493 - DNA, 11 bp, Unknown
  misc_feature (1)..( 11): Result.006 file - promoters50/4771426
aaatataaaca

SEQ ID NO: 191494 - DNA, 11 bp, Unknown
  misc_feature (1)..( 11): Result.006 file - promoters50/4771426
gtgtataaaaa

SEQ ID NO: 191495 - DNA, 11 bp, Unknown
  misc_feature (1)..( 11): Result.006 file - promoters50/4771426
ccaaagaaaag

SEQ ID NO: 191496 - DNA, 12 bp, Unknown
  misc_feature (1)..( 12): Result.006 file - promoters50/4771426
aaataaaaagaa

SEQ ID NO: 191497 - DNA, 12 bp, Unknown
  misc_feature (1)..( 12): Result.006 file - promoters50/4771426
aaacaaaaaaat

SEQ ID NO: 191498 - DNA, 12 bp, Unknown
  misc_feature (1)..( 12): Result.006 file - promoters50/4771426
gtataaaaagtt

SEQ ID NO: 191499 - DNA, 12 bp, Unknown
  misc_feature (1)..( 12): Result.006 file - promoters50/4771426
aaggaaaaaata

SEQ ID NO: 191500 - DNA, 9 bp, Unknown
  misc_feature (1)..( 9): Result.006 file - promoters50/4771426
aaattatag

SEQ ID NO: 191501 - DNA, 9 bp, Unknown
  misc_feature (1)..( 9): Result.006 file - promoters50/4771426
gtattttag

SEQ ID NO: 191502 - DNA, 9 bp, Unknown
  misc_feature (1)..( 9): Result.006 file - promoters50/4771426
aaaatattt

SEQ ID NO: 191503 - DNA, 9 bp, Unknown
  misc_feature (1)..( 9): Result.006 file - promoters50/4771433
aaaaaataa

SEQ ID NO: 191504 - DNA, 7 bp, Unknown
  misc_feature (1)..( 7): Result.006 file - promoters50/4771433
ttgacca

SEQ ID NO: 191505 - DNA, 7 bp, Unknown
  misc_feature (1)..( 7): Result.006 file - promoters50/4771433
ttgacca

SEQ ID NO: 191506 - DNA, 7 bp, Unknown
  misc_feature (1)..( 7): Result.006 file - promoters50/4771441
ttgacca

SEQ ID NO: 191507 - DNA, 8 bp, Unknown
  misc_feature (1)..( 8): Result.006 file - promoters50/4771441
gtttgttt

SEQ ID NO: 191508 - DNA, 8 bp, Unknown
  misc_feature (1)..( 8): Result.006 file - promoters50/4771441
gttttttt

SEQ ID NO: 191509 - DNA, 8 bp, Unknown
  misc_feature (1)..( 8): Result.006 file - promoters50/4771441
attttttg

SEQ ID NO: 191510 - DNA, 10 bp, Unknown
  misc_feature (1)..( 10): Result.006 file - promoters50/4771441
tctaatctca

SEQ ID NO: 191511 - DNA, 10 bp, Unknown
  misc_feature (1)..( 10): Result.006 file - promoters50/4771441
tctattcttt

SEQ ID NO: 191512 - DNA, 10 bp, Unknown
  misc_feature (1)..( 10): Result.006 file - promoters50/4771446
cgaatttttt

SEQ ID NO: 191513 - DNA, 13 bp, Unknown
  misc_feature (1)..( 13): Result.006 file - promoters50/4771446
gttttttttgttt

SEQ ID NO: 191514 - DNA, 13 bp, Unknown
  misc_feature (1)..( 13): Result.006 file - promoters50/4771446
tctgagtttgtta

SEQ ID NO: 191515 - DNA, 13 bp, Unknown
  misc_feature (1)..( 13): Result.006 file - promoters50/4771446
gtttcttttgttt

SEQ ID NO: 191516 - DNA, 7 bp, Unknown
  misc_feature (1)..( 7): Result.006 file - promoters50/4771446
ataaaaa

SEQ ID NO: 191517 - DNA, 7 bp, Unknown
  misc_feature (1)..( 7): Result.006 file - promoters50/4771446
ataaaaa

SEQ ID NO: 191518 - DNA, 8 bp, Unknown
  misc_feature (1)..( 8): Result.006 file - promoters50/4771446
atagaaaa

SEQ ID NO: 191519 - DNA, 7 bp, Unknown
  misc_feature (1)..( 7): Result.006 file - promoters50/4771446
caaattt

SEQ ID NO: 191520 - DNA, 7 bp, Unknown
  misc_feature (1)..( 7): Result.006 file - promoters50/4771446
caaattc

SEQ ID NO: 191521 - DNA, 7 bp, Unknown
  misc_feature (1)..( 7): Result.006 file - promoters50/4771446
gaaattt

SEQ ID NO: 191522 - DNA, 8 bp, Unknown
  misc_feature (1)..( 8): Result.006 file - promoters50/4771446
aaagaata

SEQ ID NO: 191523 - DNA, 8 bp, Unknown
  misc_feature (1)..( 8): Result.006 file - promoters50/4771446
aaagaaaa

SEQ ID NO: 191524 - DNA, 8 bp, Unknown
  misc_feature (1)..( 8): Result.006 file - promoters50/4771446
taagaaaa

SEQ ID NO: 191525 - DNA, 10 bp, Unknown
  misc_feature (1)..( 10): Result.006 file - promoters50/4771446
tacgtttttt

SEQ ID NO: 191526 - DNA, 10 bp, Unknown
  misc_feature (1)..( 10): Result.006 file - promoters50/4771446
aatgtttttt

SEQ ID NO: 191527 - DNA, 10 bp, Unknown
  misc_feature (1)..( 10): Result.006 file - promoters50/4771457
atggtttctc

SEQ ID NO: 191528 - DNA, 10 bp, Unknown
  misc_feature (1)..( 10): Result.006 file - promoters50/4771457
ggtttattca

SEQ ID NO: 191529 - DNA, 10 bp, Unknown
  misc_feature (1)..( 10): Result.006 file - promoters50/4771457
ggtttatttt

SEQ ID NO: 191530 - DNA, 10 bp, Unknown
  misc_feature (1)..( 10): Result.006 file - promoters50/4771457
attttatttt

SEQ ID NO: 191531 - DNA, 9 bp, Unknown
  misc_feature (1)..( 9): Result.006 file - promoters50/4771457
aaaacctgt

SEQ ID NO: 191532 - DNA, 9 bp, Unknown
  misc_feature (1)..( 9): Result.006 file - promoters50/4771457
ttaacttgt

SEQ ID NO: 191533 - DNA, 9 bp, Unknown
  misc_feature (1)..( 9): Result.006 file - promoters50/4771457
aaaacctaa

SEQ ID NO: 191534 - DNA, 7 bp, Unknown
  misc_feature (1)..( 7): Result.006 file - promoters50/4771457
cttcctt

SEQ ID NO: 191535 - DNA, 7 bp, Unknown
  misc_feature (1)..( 7): Result.006 file - promoters50/4771457
attcctt

SEQ ID NO: 191536 - DNA, 7 bp, Unknown
  misc_feature (1)..( 7): Result.006 file - promoters50/4771464
atttctt

SEQ ID NO: 191537 - DNA, 11 bp, Unknown
  misc_feature (1)..( 11): Result.006 file - promoters50/4771464
tgaagctttgg

SEQ ID NO: 191538 - DNA, 11 bp, Unknown
  misc_feature (1)..( 11): Result.006 file - promoters50/4771464
tgaggctgatc

SEQ ID NO: 191539 - DNA, 11 bp, Unknown
  misc_feature (1)..( 11): Result.006 file - promoters50/4771464
caaagctttaa

SEQ ID NO: 191540 - DNA, 11 bp, Unknown
  misc_feature (1)..( 11): Result.006 file - promoters50/4771464
cagagcttttt

SEQ ID NO: 191541 - DNA, 11 bp, Unknown
  misc_feature (1)..( 11): Result.006 file - promoters50/4771464
taaatctttgt

SEQ ID NO: 191542 - DNA, 11 bp, Unknown
  misc_feature (1)..( 11): Result.006 file - promoters50/4771467
aatgtctatgt

SEQ ID NO: 191543 - DNA, 9 bp, Unknown
  misc_feature (1)..( 9): Result.006 file - promoters50/4771467
tataatttg

SEQ ID NO: 191544 - DNA, 9 bp, Unknown
  misc_feature (1)..( 9): Result.006 file - promoters50/4771467
tattattac

SEQ ID NO: 191545 - DNA, 9 bp, Unknown
  misc_feature (1)..( 9): Result.006 file - promoters50/4771469
cataatttg

SEQ ID NO: 191546 - DNA, 7 bp, Unknown
  misc_feature (1)..( 7): Result.006 file - promoters50/4771469
caaaact

SEQ ID NO: 191547 - DNA, 7 bp, Unknown
  misc_feature (1)..( 7): Result.006 file - promoters50/4771469
caaaacc

SEQ ID NO: 191548 - DNA, 7 bp, Unknown
  misc_feature (1)..( 7): Result.006 file - promoters50/4771469
caaaact

SEQ ID NO: 191549 - DNA, 8 bp, Unknown
  misc_feature (1)..( 8): Result.006 file - promoters50/4771469
cataaaat

SEQ ID NO: 191550 - DNA, 8 bp, Unknown
  misc_feature (1)..( 8): Result.006 file - promoters50/4771469
catgaaac

SEQ ID NO: 191551 - DNA, 8 bp, Unknown
  misc_feature (1)..( 8): Result.006 file - promoters50/4771469
actaaaat

SEQ ID NO: 191552 - DNA, 8 bp, Unknown
  misc_feature (1)..( 8): Result.006 file - promoters50/4771469
taggctca

SEQ ID NO: 191553 - DNA, 8 bp, Unknown
  misc_feature (1)..( 8): Result.006 file - promoters50/4771469
gaggctca

SEQ ID NO: 191554 - DNA, 8 bp, Unknown
  misc_feature (1)..( 8): Result.006 file - promoters50/4771472
gaggctga

SEQ ID NO: 191555 - DNA, 9 bp, Unknown
  misc_feature (1)..( 9): Result.006 file - promoters50/4771472
taaacttta

SEQ ID NO: 191556 - DNA, 9 bp, Unknown
  misc_feature (1)..( 9): Result.006 file - promoters50/4771472
caaaattta

SEQ ID NO: 191557 - DNA, 9 bp, Unknown
  misc_feature (1)..( 9): Result.006 file - promoters50/4771472
taagctttt

SEQ ID NO: 191558 - DNA, 9 bp, Unknown
  misc_feature (1)..( 9): Result.006 file - promoters50/4771472
aaaagttta

SEQ ID NO: 191559 - DNA, 9 bp, Unknown
  misc_feature (1)..( 9): Result.006 file - promoters50/4771472
tacaattta

SEQ ID NO: 191560 - DNA, 9 bp, Unknown
  misc_feature (1)..( 9): Result.006 file - promoters50/4771472
cacactttt

SEQ ID NO: 191561 - DNA, 10 bp, Unknown
  misc_feature (1)..( 10): Result.006 file - promoters50/4771472
cctatataaa

SEQ ID NO: 191562 - DNA, 10 bp, Unknown
  misc_feature (1)..( 10): Result.006 file - promoters50/4771472
cctttatcat

SEQ ID NO: 191563 - DNA, 10 bp, Unknown
  misc_feature (1)..( 10): Result.006 file - promoters50/4771472
cctatttaaa

SEQ ID NO: 191564 - DNA, 10 bp, Unknown
  misc_feature (1)..( 10): Result.006 file - promoters50/4771472
cttatataaa

SEQ ID NO: 191565 - DNA, 10 bp, Unknown
  misc_feature (1)..( 10): Result.006 file - promoters50/4771472
ttattttaaa

SEQ ID NO: 191566 - DNA, 10 bp, Unknown
  misc_feature (1)..( 10): Result.006 file - promoters50/4771472
cttatattag

SEQ ID NO: 191567 - DNA, 10 bp, Unknown
  misc_feature (1)..( 10): Result.006 file - promoters50/4771472
ataatataaa

SEQ ID NO: 191568 - DNA, 14 bp, Unknown
  misc_feature (1)..( 14): Result.006 file - promoters50/4771472
atgattttcacaag

SEQ ID NO: 191569 - DNA, 15 bp, Unknown
  misc_feature (1)..( 15): Result.006 file - promoters50/4771472
caatattttcaaaag

SEQ ID NO: 191570 - DNA, 15 bp, Unknown
  misc_feature (1)..( 15): Result.006 file - promoters50/4771472
gaccattttccggcg

SEQ ID NO: 191571 - DNA, 15 bp, Unknown
  misc_feature (1)..( 15): Result.006 file - promoters50/4771472
aataatttgaatggt

SEQ ID NO: 191572 - DNA, 15 bp, Unknown
  misc_feature (1)..( 15): Result.006 file - promoters50/4771472
ttgtattttagagaa

SEQ ID NO: 191573 - DNA, 15 bp, Unknown
  misc_feature (1)..( 15): Result.006 file - promoters50/4771478
tgtcattttaaaaac

SEQ ID NO: 191574 - DNA, 13 bp, Unknown
  misc_feature (1)..( 13): Result.006 file - promoters50/4771478
ttaaaataataat

SEQ ID NO: 191575 - DNA, 13 bp, Unknown
  misc_feature (1)..( 13): Result.006 file - promoters50/4771478
agaaaataaaaat

SEQ ID NO: 191576 - DNA, 13 bp, Unknown
  misc_feature (1)..( 13): Result.006 file - promoters50/4771478
gtcaaacaaatac

SEQ ID NO: 191577 - DNA, 13 bp, Unknown
  misc_feature (1)..( 13): Result.006 file - promoters50/4771478
taaaagtaaatca

SEQ ID NO: 191578 - DNA, 13 bp, Unknown
  misc_feature (1)..( 13): Result.006 file - promoters50/4771478
agaaaataaaaaa

SEQ ID NO: 191579 - DNA, 13 bp, Unknown
  misc_feature (1)..( 13): Result.006 file - promoters50/4771478
tatatataaaaat

SEQ ID NO: 191580 - DNA, 13 bp, Unknown
  misc_feature (1)..( 13): Result.006 file - promoters50/4771478
gatccataacagt

SEQ ID NO: 191581 - DNA, 12 bp, Unknown
  misc_feature (1)..( 12): Result.006 file - promoters50/4771478
aataagtaaaag

SEQ ID NO: 191582 - DNA, 12 bp, Unknown
  misc_feature (1)..( 12): Result.006 file - promoters50/4771478
ggccagtcaaac

SEQ ID NO: 191583 - DNA, 12 bp, Unknown
  misc_feature (1)..( 12): Result.006 file - promoters50/4771478
taaaagtaaatc

SEQ ID NO: 191584 - DNA, 12 bp, Unknown
  misc_feature (1)..( 12): Result.006 file - promoters50/4771478
agaaaataaaaa

SEQ ID NO: 191585 - DNA, 12 bp, Unknown
  misc_feature (1)..( 12): Result.006 file - promoters50/4771478
agaaaataaaaa

SEQ ID NO: 191586 - DNA, 12 bp, Unknown
  misc_feature (1)..( 12): Result.006 file - promoters50/4771478
tatatataaaaa

SEQ ID NO: 191587 - DNA, 11 bp, Unknown
  misc_feature (1)..( 11): Result.006 file - promoters50/4771478
tcaaaaataag

SEQ ID NO: 191588 - DNA, 11 bp, Unknown
  misc_feature (1)..( 11): Result.006 file - promoters50/4771478
acataaataaa

SEQ ID NO: 191589 - DNA, 12 bp, Unknown
  misc_feature (1)..( 12): Result.006 file - promoters50/4771478
cttaaaagtaaa

SEQ ID NO: 191590 - DNA, 12 bp, Unknown
  misc_feature (1)..( 12): Result.006 file - promoters50/4771478
agagaaaataaa

SEQ ID NO: 191591 - DNA, 12 bp, Unknown
  misc_feature (1)..( 12): Result.006 file - promoters50/4771478
attatatataaa

SEQ ID NO: 191592 - DNA, 12 bp, Unknown
  misc_feature (1)..( 12): Result.006 file - promoters50/4771482
attttatatatg

SEQ ID NO: 191593 - DNA, 7 bp, Unknown
  misc_feature (1)..( 7): Result.006 file - promoters50/4771482
aaaagtg

SEQ ID NO: 191594 - DNA, 7 bp, Unknown
  misc_feature (1)..( 7): Result.006 file - promoters50/4771482
taaagtg

SEQ ID NO: 191595 - DNA, 7 bp, Unknown
  misc_feature (1)..( 7): Result.006 file - promoters50/4771495
taaagtt

SEQ ID NO: 191596 - DNA, 9 bp, Unknown
  misc_feature (1)..( 9): Result.006 file - promoters50/4771495
taattgttc

SEQ ID NO: 191597 - DNA, 9 bp, Unknown
  misc_feature (1)..( 9): Result.006 file - promoters50/4771495
gaattgtag

SEQ ID NO: 191598 - DNA, 9 bp, Unknown
  misc_feature (1)..( 9): Result.006 file - promoters50/4771495
aaatagttt

SEQ ID NO: 191599 - DNA, 9 bp, Unknown
  misc_feature (1)..( 9): Result.006 file - promoters50/4771495
aaattctag

SEQ ID NO: 191600 - DNA, 9 bp, Unknown
  misc_feature (1)..( 9): Result.006 file - promoters50/4771495
aaattaggc

SEQ ID NO: 191601 - DNA, 9 bp, Unknown
  misc_feature (1)..( 9): Result.006 file - promoters50/4771495
aaatagacg

SEQ ID NO: 191602 - DNA, 12 bp, Unknown
  misc_feature (1)..( 12): Result.006 file - promoters50/4771495
gatttaaattat

SEQ ID NO: 191603 - DNA, 12 bp, Unknown
  misc_feature (1)..( 12): Result.006 file - promoters50/4771495
tatttaacattt

SEQ ID NO: 191604 - DNA, 12 bp, Unknown
  misc_feature (1)..( 12): Result.006 file - promoters50/4771495
aattaaaataaa

SEQ ID NO: 191605 - DNA, 12 bp, Unknown
  misc_feature (1)..( 12): Result.006 file - promoters50/4771495
tattgaaaaatc

SEQ ID NO: 191606 - DNA, 12 bp, Unknown
  misc_feature (1)..( 12): Result.006 file - promoters50/4771495
ggataaaaaaaa

SEQ ID NO: 191607 - DNA, 12 bp, Unknown
  misc_feature (1)..( 12): Result.006 file - promoters50/4771495
tattgatttgtt

SEQ ID NO: 191608 - DNA, 12 bp, Unknown
  misc_feature (1)..( 12): Result.006 file - promoters50/4771495
tctaattgttca

SEQ ID NO: 191609 - DNA, 12 bp, Unknown
  misc_feature (1)..( 12): Result.006 file - promoters50/4771495
ttgatttgttcc

SEQ ID NO: 191610 - DNA, 12 bp, Unknown
  misc_feature (1)..( 12): Result.006 file - promoters50/4771495
taaaatagtttt

SEQ ID NO: 191611 - DNA, 12 bp, Unknown
  misc_feature (1)..( 12): Result.006 file - promoters50/4771495
ttgaattgttcc

SEQ ID NO: 191612 - DNA, 12 bp, Unknown
  misc_feature (1)..( 12): Result.006 file - promoters50/4771495
acaaattaggct

SEQ ID NO: 191613 - DNA, 12 bp, Unknown
  misc_feature (1)..( 12): Result.006 file - promoters50/4771502
gtaaatagacgt

SEQ ID NO: 191614 - DNA, 7 bp, Unknown
  misc_feature (1)..( 7): Result.006 file - promoters50/4771502
taatttt

SEQ ID NO: 191615 - DNA, 7 bp, Unknown
  misc_feature (1)..( 7): Result.006 file - promoters50/4771502
caatttt

SEQ ID NO: 191616 - DNA, 7 bp, Unknown
  misc_feature (1)..( 7): Result.006 file - promoters50/4771502
caatttg

SEQ ID NO: 191617 - DNA, 13 bp, Unknown
  misc_feature (1)..( 13): Result.006 file - promoters50/4771502
atatatttcattt

SEQ ID NO: 191618 - DNA, 13 bp, Unknown
  misc_feature (1)..( 13): Result.006 file - promoters50/4771502
ataaattacattt

SEQ ID NO: 191619 - DNA, 13 bp, Unknown
  misc_feature (1)..( 13): Result.006 file - promoters50/4771519
aggtctttccttt

SEQ ID NO: 191620 - DNA, 14 bp, Unknown
  misc_feature (1)..( 14): Result.006 file - promoters50/4771519
taaatctgtgatat

SEQ ID NO: 191621 - DNA, 14 bp, Unknown
  misc_feature (1)..( 14): Result.006 file - promoters50/4771519
gaaatctccctcta

SEQ ID NO: 191622 - DNA, 14 bp, Unknown
  misc_feature (1)..( 14): Result.006 file - promoters50/4771519
taaatcactcctta

SEQ ID NO: 191623 - DNA, 14 bp, Unknown
  misc_feature (1)..( 14): Result.006 file - promoters50/4771519
ctaatttgttataa

SEQ ID NO: 191624 - DNA, 14 bp, Unknown
  misc_feature (1)..( 14): Result.006 file - promoters50/4771519
ggaatgtgtaatat

SEQ ID NO: 191625 - DNA, 14 bp, Unknown
  misc_feature (1)..( 14): Result.006 file - promoters50/4771519
caaacctccgccga

SEQ ID NO: 191626 - DNA, 14 bp, Unknown
  misc_feature (1)..( 14): Result.006 file - promoters50/4771523
gaattcttttttgt

SEQ ID NO: 191627 - DNA, 10 bp, Unknown
  misc_feature (1)..( 10): Result.006 file - promoters50/4771523
ttagctaacg

SEQ ID NO: 191628 - DNA, 10 bp, Unknown
  misc_feature (1)..( 10): Result.006 file - promoters50/4771523
ttaactaaat

SEQ ID NO: 191629 - DNA, 10 bp, Unknown
  misc_feature (1)..( 10): Result.006 file - promoters50/4771523
tacactaaac

SEQ ID NO: 191630 - DNA, 10 bp, Unknown
  misc_feature (1)..( 10): Result.006 file - promoters50/4771523
aaaaccaaaa

SEQ ID NO: 191631 - DNA, 10 bp, Unknown
  misc_feature (1)..( 10): Result.006 file - promoters50/4771523
taaaacaaca

SEQ ID NO: 191632 - DNA, 10 bp, Unknown
  misc_feature (1)..( 10): Result.006 file - promoters50/4771523
cttaccaaaa

SEQ ID NO: 191633 - DNA, 15 bp, Unknown
  misc_feature (1)..( 15): Result.006 file - promoters50/4771523
tgtgaaaaatcgtca

SEQ ID NO: 191634 - DNA, 15 bp, Unknown
  misc_feature (1)..( 15): Result.006 file - promoters50/4771523
tcagaaaaaggtttt

SEQ ID NO: 191635 - DNA, 15 bp, Unknown
  misc_feature (1)..( 15): Result.006 file - promoters50/4771523
cacaaaaaatgtgaa

SEQ ID NO: 191636 - DNA, 15 bp, Unknown
  misc_feature (1)..( 15): Result.006 file - promoters50/4771523
tcagaaaaaagagag

SEQ ID NO: 191637 - DNA, 15 bp, Unknown
  misc_feature (1)..( 15): Result.006 file - promoters50/4771523
atacaaactgtgaaa

SEQ ID NO: 191638 - DNA, 15 bp, Unknown
  misc_feature (1)..( 15): Result.006 file - promoters50/4771565
tgtgaaatcgtattt

SEQ ID NO: 191639 - DNA, 10 bp, Unknown
  misc_feature (1)..( 10): Result.006 file - promoters50/4771565
catttgggtc

SEQ ID NO: 191640 - DNA, 10 bp, Unknown
  misc_feature (1)..( 10): Result.006 file - promoters50/4771565
cattagggct

SEQ ID NO: 191641 - DNA, 10 bp, Unknown
  misc_feature (1)..( 10): Result.006 file - promoters50/4771565
aacttgagtc

SEQ ID NO: 191642 - DNA, 12 bp, Unknown
  misc_feature (1)..( 12): Result.006 file - promoters50/4771565
tatatatatttt

SEQ ID NO: 191643 - DNA, 12 bp, Unknown
  misc_feature (1)..( 12): Result.006 file - promoters50/4771565
tatatttatttt

SEQ ID NO: 191644 - DNA, 12 bp, Unknown
  misc_feature (1)..( 12): Result.006 file - promoters50/4771565
ggtgattatttg

SEQ ID NO: 191645 - DNA, 10 bp, Unknown
  misc_feature (1)..( 10): Result.006 file - promoters50/4771565
gcttttactc

SEQ ID NO: 191646 - DNA, 10 bp, Unknown
  misc_feature (1)..( 10): Result.006 file - promoters50/4771565
ttttttactt

SEQ ID NO: 191647 - DNA, 10 bp, Unknown
  misc_feature (1)..( 10): Result.006 file - promoters50/4771579
ttttttcctt

SEQ ID NO: 191648 - DNA, 7 bp, Unknown
  misc_feature (1)..( 7): Result.006 file - promoters50/4771579
aaagaaa

SEQ ID NO: 191649 - DNA, 7 bp, Unknown
  misc_feature (1)..( 7): Result.006 file - promoters50/4771579
aaacaaa

SEQ ID NO: 191650 - DNA, 8 bp, Unknown
  misc_feature (1)..( 8): Result.006 file - promoters50/4771579
aaatgaac

SEQ ID NO: 191651 - DNA, 8 bp, Unknown
  misc_feature (1)..( 8): Result.006 file - promoters50/4771586
aaaacaac

SEQ ID NO: 191652 - DNA, 14 bp, Unknown
  misc_feature (1)..( 14): Result.006 file - promoters50/4771586
atttaaaatgttag

SEQ ID NO: 191653 - DNA, 14 bp, Unknown
  misc_feature (1)..( 14): Result.006 file - promoters50/4771586
tgataaaatagttt

SEQ ID NO: 191654 - DNA, 14 bp, Unknown
  misc_feature (1)..( 14): Result.006 file - promoters50/4771586
caaaaaaattgtgg

SEQ ID NO: 191655 - DNA, 14 bp, Unknown
  misc_feature (1)..( 14): Result.006 file - promoters50/4771586
ttataaaacgacgt

SEQ ID NO: 191656 - DNA, 14 bp, Unknown
  misc_feature (1)..( 14): Result.006 file - promoters50/4771586
aagtaaagttgatt

SEQ ID NO: 191657 - DNA, 14 bp, Unknown
  misc_feature (1)..( 14): Result.006 file - promoters50/4771586
ttatcaaattgaat

SEQ ID NO: 191658 - DNA, 14 bp, Unknown
  misc_feature (1)..( 14): Result.006 file - promoters50/4771586
tacataaataaatt

SEQ ID NO: 191659 - DNA, 12 bp, Unknown
  misc_feature (1)..( 12): Result.006 file - promoters50/4771586
tttaaaatgtta

SEQ ID NO: 191660 - DNA, 12 bp, Unknown
  misc_feature (1)..( 12): Result.006 file - promoters50/4771586
tgtataatttta

SEQ ID NO: 191661 - DNA, 12 bp, Unknown
  misc_feature (1)..( 12): Result.006 file - promoters50/4771586
taataaaagttt

SEQ ID NO: 191662 - DNA, 12 bp, Unknown
  misc_feature (1)..( 12): Result.006 file - promoters50/4771586
aaaaaaattgtg

SEQ ID NO: 191663 - DNA, 12 bp, Unknown
  misc_feature (1)..( 12): Result.006 file - promoters50/4771586
gaagtaaagttg

SEQ ID NO: 191664 - DNA, 12 bp, Unknown
  misc_feature (1)..( 12): Result.006 file - promoters50/4771601
aaataaattaat

SEQ ID NO: 191665 - DNA, 8 bp, Unknown
  misc_feature (1)..( 8): Result.006 file - promoters50/4771601
aaaaagtt

SEQ ID NO: 191666 - DNA, 8 bp, Unknown
  misc_feature (1)..( 8): Result.006 file - promoters50/4771601
aaatagtg

SEQ ID NO: 191667 - DNA, 8 bp, Unknown
  misc_feature (1)..( 8): Result.006 file - promoters50/4771601
gaaaagtt

SEQ ID NO: 191668 - DNA, 10 bp, Unknown
  misc_feature (1)..( 10): Result.006 file - promoters50/4771601
aaactcaaaa

SEQ ID NO: 191669 - DNA, 10 bp, Unknown
  misc_feature (1)..( 10): Result.006 file - promoters50/4771601
aaacttaaaa

SEQ ID NO: 191670 - DNA, 11 bp, Unknown
  misc_feature (1)..( 11): Result.006 file - promoters50/4771601
aaaccttactt

SEQ ID NO: 191671 - DNA, 14 bp, Unknown
  misc_feature (1)..( 14): Result.006 file - promoters50/4771601
atatatgtatctct

SEQ ID NO: 191672 - DNA, 14 bp, Unknown
  misc_feature (1)..( 14): Result.006 file - promoters50/4771601
ttatttgtatttct

SEQ ID NO: 191673 - DNA, 14 bp, Unknown
  misc_feature (1)..( 14): Result.006 file - promoters50/4771601
atatatacaacaaa

SEQ ID NO: 191674 - DNA, 7 bp, Unknown
  misc_feature (1)..( 7): Result.006 file - promoters50/4771601
ttatata

SEQ ID NO: 191675 - DNA, 7 bp, Unknown
  misc_feature (1)..( 7): Result.006 file - promoters50/4771601
atatata

SEQ ID NO: 191676 - DNA, 7 bp, Unknown
  misc_feature (1)..( 7): Result.006 file - promoters50/4771601
ataaata

SEQ ID NO: 191677 - DNA, 10 bp, Unknown
  misc_feature (1)..( 10): Result.006 file - promoters50/4771601
tatcaatcaa

SEQ ID NO: 191678 - DNA, 10 bp, Unknown
  misc_feature (1)..( 10): Result.006 file - promoters50/4771601
tatcaaccaa

SEQ ID NO: 191679 - DNA, 10 bp, Unknown
  misc_feature (1)..( 10): Result.006 file - promoters50/4771612
tatcaaaacg

SEQ ID NO: 191680 - DNA, 8 bp, Unknown
  misc_feature (1)..( 8): Result.006 file - promoters50/4771612
cgaatctt

SEQ ID NO: 191681 - DNA, 8 bp, Unknown
  misc_feature (1)..( 8): Result.006 file - promoters50/4771612
tgaatctt

SEQ ID NO: 191682 - DNA, 8 bp, Unknown
  misc_feature (1)..( 8): Result.006 file - promoters50/4771612
cgaatctt

SEQ ID NO: 191683 - DNA, 8 bp, Unknown
  misc_feature (1)..( 8): Result.006 file - promoters50/4771612
ttcacaaa

SEQ ID NO: 191684 - DNA, 8 bp, Unknown
  misc_feature (1)..( 8): Result.006 file - promoters50/4771612
ctcataaa

SEQ ID NO: 191685 - DNA, 8 bp, Unknown
  misc_feature (1)..( 8): Result.006 file - promoters50/4771612
ttcacacc

SEQ ID NO: 191686 - DNA, 8 bp, Unknown
  misc_feature (1)..( 8): Result.006 file - promoters50/4771612
aaaacaaa

SEQ ID NO: 191687 - DNA, 8 bp, Unknown
  misc_feature (1)..( 8): Result.006 file - promoters50/4771612
aaatcaaa

SEQ ID NO: 191688 - DNA, 8 bp, Unknown
  misc_feature (1)..( 8): Result.006 file - promoters50/4771616
gtatcaaa

SEQ ID NO: 191689 - DNA, 8 bp, Unknown
  misc_feature (1)..( 8): Result.006 file - promoters50/4771616
caataatg

SEQ ID NO: 191690 - DNA, 8 bp, Unknown
  misc_feature (1)..( 8): Result.006 file - promoters50/4771616
tcataatg

SEQ ID NO: 191691 - DNA, 8 bp, Unknown
  misc_feature (1)..( 8): Result.006 file - promoters50/4771616
caacaatt

SEQ ID NO: 191692 - DNA, 10 bp, Unknown
  misc_feature (1)..( 10): Result.006 file - promoters50/4771616
atgataaata

SEQ ID NO: 191693 - DNA, 10 bp, Unknown
  misc_feature (1)..( 10): Result.006 file - promoters50/4771616
ttcatagata

SEQ ID NO: 191694 - DNA, 10 bp, Unknown
  misc_feature (1)..( 10): Result.006 file - promoters50/4771616
ttcttagaag

SEQ ID NO: 191695 - DNA, 11 bp, Unknown
  misc_feature (1)..( 11): Result.006 file - promoters50/4771616
tacatgaaatg

SEQ ID NO: 191696 - DNA, 11 bp, Unknown
  misc_feature (1)..( 11): Result.006 file - promoters50/4771616
aaaaagaaatg

SEQ ID NO: 191697 - DNA, 11 bp, Unknown
  misc_feature (1)..( 11): Result.006 file - promoters50/4771616
aaaaaaaaatg

SEQ ID NO: 191698 - DNA, 11 bp, Unknown
  misc_feature (1)..( 11): Result.006 file - promoters50/4771616
ctaaaaaaagg

SEQ ID NO: 191699 - DNA, 8 bp, Unknown
  misc_feature (1)..( 8): Result.006 file - promoters50/4771616
ataaaaaa

SEQ ID NO: 191700 - DNA, 8 bp, Unknown
  misc_feature (1)..( 8): Result.006 file - promoters50/4771616
atataaat

SEQ ID NO: 191701 - DNA, 9 bp, Unknown
  misc_feature (1)..( 9): Result.006 file - promoters50/4771616
ataaataac

SEQ ID NO: 191702 - DNA, 8 bp, Unknown
  misc_feature (1)..( 8): Result.006 file - promoters50/4771616
aaaatttt

SEQ ID NO: 191703 - DNA, 8 bp, Unknown
  misc_feature (1)..( 8): Result.006 file - promoters50/4771616
ataatttt

SEQ ID NO: 191704 - DNA, 8 bp, Unknown
  misc_feature (1)..( 8): Result.006 file - promoters50/4771616
aaaattta

SEQ ID NO: 191705 - DNA, 12 bp, Unknown
  misc_feature (1)..( 12): Result.006 file - promoters50/4771616
aaaactaacttg

SEQ ID NO: 191706 - DNA, 12 bp, Unknown
  misc_feature (1)..( 12): Result.006 file - promoters50/4771616
gtttctatcttt

SEQ ID NO: 191707 - DNA, 12 bp, Unknown
  misc_feature (1)..( 12): Result.006 file - promoters50/4771616
gtttctttcttc

SEQ ID NO: 191708 - DNA, 12 bp, Unknown
  misc_feature (1)..( 12): Result.006 file - promoters50/4771616
gttatttttttt

SEQ ID NO: 191709 - DNA, 13 bp, Unknown
  misc_feature (1)..( 13): Result.006 file - promoters50/4771616
cacgaaatttcca

SEQ ID NO: 191710 - DNA, 13 bp, Unknown
  misc_feature (1)..( 13): Result.006 file - promoters50/4771616
aaagaaaattcga

SEQ ID NO: 191711 - DNA, 13 bp, Unknown
  misc_feature (1)..( 13): Result.006 file - promoters50/4771616
atataaaaaaaaa

SEQ ID NO: 191712 - DNA, 13 bp, Unknown
  misc_feature (1)..( 13): Result.006 file - promoters50/4771616
taataaaattgaa

SEQ ID NO: 191713 - DNA, 7 bp, Unknown
  misc_feature (1)..( 7): Result.006 file - promoters50/4771616
taaaaaa

SEQ ID NO: 191714 - DNA, 7 bp, Unknown
  misc_feature (1)..( 7): Result.006 file - promoters50/4771616
caaaaaa

SEQ ID NO: 191715 - DNA, 8 bp, Unknown
  misc_feature (1)..( 8): Result.006 file - promoters50/4771616
taataaaa

SEQ ID NO: 191716 - DNA, 6 bp, Unknown
  misc_feature (1)..( 6): Result.006 file - promoters50/4771616
acaatt

SEQ ID NO: 191717 - DNA, 6 bp, Unknown
  misc_feature (1)..( 6): Result.006 file - promoters50/4771616
acaatt

SEQ ID NO: 191718 - DNA, 6 bp, Unknown
  misc_feature (1)..( 6): Result.006 file - promoters50/4771616
acaatt

SEQ ID NO: 191719 - DNA, 8 bp, Unknown
  misc_feature (1)..( 8): Result.006 file - promoters50/4771616
ttaaaaaa

SEQ ID NO: 191720 - DNA, 8 bp, Unknown
  misc_feature (1)..( 8): Result.006 file - promoters50/4771616
ttagaaaa

SEQ ID NO: 191721 - DNA, 8 bp, Unknown
  misc_feature (1)..( 8): Result.006 file - promoters50/4771616
ctagaaac

SEQ ID NO: 191722 - DNA, 8 bp, Unknown
  misc_feature (1)..( 8): Result.006 file - promoters50/4771616
taaaaaga

SEQ ID NO: 191723 - DNA, 8 bp, Unknown
  misc_feature (1)..( 8): Result.006 file - promoters50/4771616
taaaaaaa

SEQ ID NO: 191724 - DNA, 8 bp, Unknown
  misc_feature (1)..( 8): Result.006 file - promoters50/4771620
caaaaaaa

SEQ ID NO: 191725 - DNA, 7 bp, Unknown
  misc_feature (1)..( 7): Result.006 file - promoters50/4771620
ttatatt

SEQ ID NO: 191726 - DNA, 7 bp, Unknown
  misc_feature (1)..( 7): Result.006 file - promoters50/4771620
ttatatc

SEQ ID NO: 191727 - DNA, 7 bp, Unknown
  misc_feature (1)..( 7): Result.006 file - promoters50/4771620
ttagatt

SEQ ID NO: 191728 - DNA, 8 bp, Unknown
  misc_feature (1)..( 8): Result.006 file - promoters50/4771620
attacatt

SEQ ID NO: 191729 - DNA, 8 bp, Unknown
  misc_feature (1)..( 8): Result.006 file - promoters50/4771620
catacatt

SEQ ID NO: 191730 - DNA, 8 bp, Unknown
  misc_feature (1)..( 8): Result.006 file - promoters50/4771624
catccatg

SEQ ID NO: 191731 - DNA, 11 bp, Unknown
  misc_feature (1)..( 11): Result.006 file - promoters50/4771624
ggattttcaaa

SEQ ID NO: 191732 - DNA, 11 bp, Unknown
  misc_feature (1)..( 11): Result.006 file - promoters50/4771624
ggagtttaaaa

SEQ ID NO: 191733 - DNA, 11 bp, Unknown
  misc_feature (1)..( 11): Result.006 file - promoters50/4771624
gcattttctta

SEQ ID NO: 191734 - DNA, 11 bp, Unknown
  misc_feature (1)..( 11): Result.006 file - promoters50/4771624
atgttttctat

SEQ ID NO: 191735 - DNA, 8 bp, Unknown
  misc_feature (1)..( 8): Result.006 file - promoters50/4771624
tttacaaa

SEQ ID NO: 191736 - DNA, 8 bp, Unknown
  misc_feature (1)..( 8): Result.006 file - promoters50/4771624
tttataaa

SEQ ID NO: 191737 - DNA, 8 bp, Unknown
  misc_feature (1)..( 8): Result.006 file - promoters50/4771624
agtataaa

SEQ ID NO: 191738 - DNA, 12 bp, Unknown
  misc_feature (1)..( 12): Result.006 file - promoters50/4771624
cttaagaagaag

SEQ ID NO: 191739 - DNA, 12 bp, Unknown
  misc_feature (1)..( 12): Result.006 file - promoters50/4771624
tataaaaagaag

SEQ ID NO: 191740 - DNA, 12 bp, Unknown
  misc_feature (1)..( 12): Result.006 file - promoters50/4771624
tatataaacata

SEQ ID NO: 191741 - DNA, 9 bp, Unknown
  misc_feature (1)..( 9): Result.006 file - promoters50/4771624
aagaaaata

SEQ ID NO: 191742 - DNA, 9 bp, Unknown
  misc_feature (1)..( 9): Result.006 file - promoters50/4771624
aagaaaatt

SEQ ID NO: 191743 - DNA, 9 bp, Unknown
  misc_feature (1)..( 9): Result.006 file - promoters50/4771638
atcaaaatt

SEQ ID NO: 191744 - DNA, 11 bp, Unknown
  misc_feature (1)..( 11): Result.006 file - promoters50/4771638
atagattaatg

SEQ ID NO: 191745 - DNA, 11 bp, Unknown
  misc_feature (1)..( 11): Result.006 file - promoters50/4771638
agttattaatc

SEQ ID NO: 191746 - DNA, 11 bp, Unknown
  misc_feature (1)..( 11): Result.006 file - promoters50/4771638
agtgattcatc

SEQ ID NO: 191747 - DNA, 10 bp, Unknown
  misc_feature (1)..( 10): Result.006 file - promoters50/4771638
gcgattaaag

SEQ ID NO: 191748 - DNA, 10 bp, Unknown
  misc_feature (1)..( 10): Result.006 file - promoters50/4771638
tttattaaag

SEQ ID NO: 191749 - DNA, 10 bp, Unknown
  misc_feature (1)..( 10): Result.006 file - promoters50/4771638
ttttttaaac

SEQ ID NO: 191750 - DNA, 8 bp, Unknown
  misc_feature (1)..( 8): Result.006 file - promoters50/4771638
tttataca

SEQ ID NO: 191751 - DNA, 8 bp, Unknown
  misc_feature (1)..( 8): Result.006 file - promoters50/4771638
cttataca

SEQ ID NO: 191752 - DNA, 9 bp, Unknown
  misc_feature (1)..( 9): Result.006 file - promoters50/4771646
tttaataag

SEQ ID NO: 191753 - DNA, 9 bp, Unknown
  misc_feature (1)..( 9): Result.006 file - promoters50/4771646
gttatatga

SEQ ID NO: 191754 - DNA, 9 bp, Unknown
  misc_feature (1)..( 9): Result.006 file - promoters50/4771646
tttatatgt

SEQ ID NO: 191755 - DNA, 9 bp, Unknown
  misc_feature (1)..( 9): Result.006 file - promoters50/4771646
attatattt

SEQ ID NO: 191756 - DNA, 10 bp, Unknown
  misc_feature (1)..( 10): Result.006 file - promoters50/4771646
attaatagtt

SEQ ID NO: 191757 - DNA, 10 bp, Unknown
  misc_feature (1)..( 10): Result.006 file - promoters50/4771646
cttaagagtt

SEQ ID NO: 191758 - DNA, 10 bp, Unknown
  misc_feature (1)..( 10): Result.006 file - promoters50/4771646
gttaagattt

SEQ ID NO: 191759 - DNA, 10 bp, Unknown
  misc_feature (1)..( 10): Result.006 file - promoters50/4771658
gctaagaggt

SEQ ID NO: 191760 - DNA, 8 bp, Unknown
  misc_feature (1)..( 8): Result.006 file - promoters50/4771658
gatgtttt

SEQ ID NO: 191761 - DNA, 8 bp, Unknown
  misc_feature (1)..( 8): Result.006 file - promoters50/4771658
catgtttc

SEQ ID NO: 191762 - DNA, 8 bp, Unknown
  misc_feature (1)..( 8): Result.006 file - promoters50/4771658
cttgtttt

SEQ ID NO: 191763 - DNA, 8 bp, Unknown
  misc_feature (1)..( 8): Result.006 file - promoters50/4771658
catcttta

SEQ ID NO: 191764 - DNA, 7 bp, Unknown
  misc_feature (1)..( 7): Result.006 file - promoters50/4771658
gatagaa

SEQ ID NO: 191765 - DNA, 7 bp, Unknown
  misc_feature (1)..( 7): Result.006 file - promoters50/4771658
gatcgaa

SEQ ID NO: 191766 - DNA, 7 bp, Unknown
  misc_feature (1)..( 7): Result.006 file - promoters50/4771674
gatggaa

SEQ ID NO: 191767 - DNA, 11 bp, Unknown
  misc_feature (1)..( 11): Result.006 file - promoters50/4771674
cttctttcctc

SEQ ID NO: 191768 - DNA, 11 bp, Unknown
  misc_feature (1)..( 11): Result.006 file - promoters50/4771674
attctatccaa

SEQ ID NO: 191769 - DNA, 11 bp, Unknown
  misc_feature (1)..( 11): Result.006 file - promoters50/4771674
attcaatccaa

SEQ ID NO: 191770 - DNA, 11 bp, Unknown
  misc_feature (1)..( 11): Result.006 file - promoters50/4771674
ttccaatcttg

SEQ ID NO: 191771 - DNA, 12 bp, Unknown
  misc_feature (1)..( 12): Result.006 file - promoters50/4771674
gttctaatcagc

SEQ ID NO: 191772 - DNA, 12 bp, Unknown
  misc_feature (1)..( 12): Result.006 file - promoters50/4771674
aaagcaatctca

SEQ ID NO: 191773 - DNA, 12 bp, Unknown
  misc_feature (1)..( 12): Result.006 file - promoters50/4771677
taaggaatctat

SEQ ID NO: 191774 - DNA, 15 bp, Unknown
  misc_feature (1)..( 15): Result.006 file - promoters50/4771677
aaaataataataaaa

SEQ ID NO: 191775 - DNA, 15 bp, Unknown
  misc_feature (1)..( 15): Result.006 file - promoters50/4771677
gaaatcataatagag

SEQ ID NO: 191776 - DNA, 15 bp, Unknown
  misc_feature (1)..( 15): Result.006 file - promoters50/4771677
attttaaaaaaagaa

SEQ ID NO: 191777 - DNA, 15 bp, Unknown
  misc_feature (1)..( 15): Result.006 file - promoters50/4771677
tcaattatatatata

SEQ ID NO: 191778 - DNA, 15 bp, Unknown
  misc_feature (1)..( 15): Result.006 file - promoters50/4771677
aaaatgaaaaacaaa

SEQ ID NO: 191779 - DNA, 15 bp, Unknown
  misc_feature (1)..( 15): Result.006 file - promoters50/4771677
caaacaaatgtttgt

SEQ ID NO: 191780 - DNA, 15 bp, Unknown
  misc_feature (1)..( 15): Result.006 file - promoters50/4771677
ctacttattccatta

SEQ ID NO: 191781 - DNA, 18 bp, Unknown
  misc_feature (1)..( 18): Result.006 file - promoters50/4771677
ccataaaactcaaaaatc

SEQ ID NO: 191782 - DNA, 18 bp, Unknown
  misc_feature (1)..( 18): Result.006 file - promoters50/4771677
ccataaagcaaacaatgg

SEQ ID NO: 191783 - DNA, 18 bp, Unknown
  misc_feature (1)..( 18): Result.006 file - promoters50/4771677
aaataaaagaattaaacc

SEQ ID NO: 191784 - DNA, 18 bp, Unknown
  misc_feature (1)..( 18): Result.006 file - promoters50/4771677
aattaaaaataaacaaaa

SEQ ID NO: 191785 - DNA, 18 bp, Unknown
  misc_feature (1)..( 18): Result.006 file - promoters50/4771677
ccaaaaaaaaaacaaaga

SEQ ID NO: 191786 - DNA, 18 bp, Unknown
  misc_feature (1)..( 18): Result.006 file - promoters50/4771677
ttatacaagaaaactcat

SEQ ID NO: 191787 - DNA, 10 bp, Unknown
  misc_feature (1)..( 10): Result.006 file - promoters50/4771677
caatctcaat

SEQ ID NO: 191788 - DNA, 10 bp, Unknown
  misc_feature (1)..( 10): Result.006 file - promoters50/4771677
ccatctcacg

SEQ ID NO: 191789 - DNA, 10 bp, Unknown
  misc_feature (1)..( 10): Result.006 file - promoters50/4771677
atatcacaaa

SEQ ID NO: 191790 - DNA, 10 bp, Unknown
  misc_feature (1)..( 10): Result.006 file - promoters50/4771677
aaatgtcaac

SEQ ID NO: 191791 - DNA, 10 bp, Unknown
  misc_feature (1)..( 10): Result.006 file - promoters50/4771677
aaatgttatt

SEQ ID NO: 191792 - DNA, 10 bp, Unknown
  misc_feature (1)..( 10): Result.006 file - promoters50/4771677
caatgatatt

SEQ ID NO: 191793 - DNA, 11 bp, Unknown
  misc_feature (1)..( 11): Result.006 file - promoters50/4771677
aaaactcaaaa

SEQ ID NO: 191794 - DNA, 11 bp, Unknown
  misc_feature (1)..( 11): Result.006 file - promoters50/4771677
caaaatcaaaa

SEQ ID NO: 191795 - DNA, 11 bp, Unknown
  misc_feature (1)..( 11): Result.006 file - promoters50/4771677
aaaactcatta

SEQ ID NO: 191796 - DNA, 11 bp, Unknown
  misc_feature (1)..( 11): Result.006 file - promoters50/4771677
ataaagcaaac

SEQ ID NO: 191797 - DNA, 11 bp, Unknown
  misc_feature (1)..( 11): Result.006 file - promoters50/4771677
aaaaaacaaag

SEQ ID NO: 191798 - DNA, 11 bp, Unknown
  misc_feature (1)..( 11): Result.006 file - promoters50/4771677
ataaataaaag

SEQ ID NO: 191799 - DNA, 15 bp, Unknown
  misc_feature (1)..( 15): Result.006 file - promoters50/4771677
aaccaaaaccaaaac

SEQ ID NO: 191800 - DNA, 15 bp, Unknown
  misc_feature (1)..( 15): Result.006 file - promoters50/4771677
aaaaaaaaacaaaga

SEQ ID NO: 191801 - DNA, 16 bp, Unknown
  misc_feature (1)..( 16): Result.006 file - promoters50/4771677
gcccataaagcaaaca

SEQ ID NO: 191802 - DNA, 16 bp, Unknown
  misc_feature (1)..( 16): Result.006 file - promoters50/4771677
taaaaataaacaaaat

SEQ ID NO: 191803 - DNA, 16 bp, Unknown
  misc_feature (1)..( 16): Result.006 file - promoters50/4771677
taacaataaataaaag

SEQ ID NO: 191804 - DNA, 16 bp, Unknown
  misc_feature (1)..( 16): Result.006 file - promoters50/4771713
gtgttttatacaagaa

SEQ ID NO: 191805 - DNA, 8 bp, Unknown
  misc_feature (1)..( 8): Result.006 file - promoters50/4771713
aaattgtg

SEQ ID NO: 191806 - DNA, 8 bp, Unknown
  misc_feature (1)..( 8): Result.006 file - promoters50/4771713
aaattggg

SEQ ID NO: 191807 - DNA, 8 bp, Unknown
  misc_feature (1)..( 8): Result.006 file - promoters50/4771713
taatcggg

SEQ ID NO: 191808 - DNA, 8 bp, Unknown
  misc_feature (1)..( 8): Result.006 file - promoters50/4771713
atataaag

SEQ ID NO: 191809 - DNA, 8 bp, Unknown
  misc_feature (1)..( 8): Result.006 file - promoters50/4771713
ttattaag

SEQ ID NO: 191810 - DNA, 8 bp, Unknown
  misc_feature (1)..( 8): Result.006 file - promoters50/4771713
ttagtaat

SEQ ID NO: 191811 - DNA, 8 bp, Unknown
  misc_feature (1)..( 8): Result.006 file - promoters50/4771713
aataaaac

SEQ ID NO: 191812 - DNA, 8 bp, Unknown
  misc_feature (1)..( 8): Result.006 file - promoters50/4771713
aataaaaa

SEQ ID NO: 191813 - DNA, 8 bp, Unknown
  misc_feature (1)..( 8): Result.006 file - promoters50/4771713
ggtaaaac

SEQ ID NO: 191814 - DNA, 11 bp, Unknown
  misc_feature (1)..( 11): Result.006 file - promoters50/4771713
gcacaataatt

SEQ ID NO: 191815 - DNA, 11 bp, Unknown
  misc_feature (1)..( 11): Result.006 file - promoters50/4771713
aaacaattatt

SEQ ID NO: 191816 - DNA, 11 bp, Unknown
  misc_feature (1)..( 11): Result.006 file - promoters50/4771713
aaacgattcca

SEQ ID NO: 191817 - DNA, 7 bp, Unknown
  misc_feature (1)..( 7): Result.006 file - promoters50/4771713
atttatt

SEQ ID NO: 191818 - DNA, 7 bp, Unknown
  misc_feature (1)..( 7): Result.006 file - promoters50/4771713
attaatt

SEQ ID NO: 191819 - DNA, 7 bp, Unknown
  misc_feature (1)..( 7): Result.006 file - promoters50/4771713
ctttatt

SEQ ID NO: 191820 - DNA, 9 bp, Unknown
  misc_feature (1)..( 9): Result.006 file - promoters50/4771713
aaaattgct

SEQ ID NO: 191821 - DNA, 9 bp, Unknown
  misc_feature (1)..( 9): Result.006 file - promoters50/4771713
aaatttgtt

SEQ ID NO: 191822 - DNA, 9 bp, Unknown
  misc_feature (1)..( 9): Result.006 file - promoters50/4771713
atatttgtt

SEQ ID NO: 191823 - DNA, 10 bp, Unknown
  misc_feature (1)..( 10): Result.006 file - promoters50/4771713
taaagtaaag

SEQ ID NO: 191824 - DNA, 10 bp, Unknown
  misc_feature (1)..( 10): Result.006 file - promoters50/4771713
aaaagaaaag

SEQ ID NO: 191825 - DNA, 10 bp, Unknown
  misc_feature (1)..( 10): Result.006 file - promoters50/4771725
aaaacaaagg

SEQ ID NO: 191826 - DNA, 13 bp, Unknown
  misc_feature (1)..( 13): Result.006 file - promoters50/4771725
cagagtaatggac

SEQ ID NO: 191827 - DNA, 13 bp, Unknown
  misc_feature (1)..( 13): Result.006 file - promoters50/4771725
cagaataaaaaca

SEQ ID NO: 191828 - DNA, 13 bp, Unknown
  misc_feature (1)..( 13): Result.006 file - promoters50/4771725
cagagtaattgat

SEQ ID NO: 191829 - DNA, 13 bp, Unknown
  misc_feature (1)..( 13): Result.006 file - promoters50/4771725
ttaattaaaagaa

SEQ ID NO: 191830 - DNA, 13 bp, Unknown
  misc_feature (1)..( 13): Result.006 file - promoters50/4771725
aaataataataat

SEQ ID NO: 191831 - DNA, 13 bp, Unknown
  misc_feature (1)..( 13): Result.006 file - promoters50/4771725
aaagaataaaaat

SEQ ID NO: 191832 - DNA, 13 bp, Unknown
  misc_feature (1)..( 13): Result.006 file - promoters50/4771725
cgttaatcaaata

SEQ ID NO: 191833 - DNA, 13 bp, Unknown
  misc_feature (1)..( 13): Result.006 file - promoters50/4771737
cactcatataaat

SEQ ID NO: 191834 - DNA, 11 bp, Unknown
  misc_feature (1)..( 11): Result.006 file - promoters50/4771737
atgaaaataaa

SEQ ID NO: 191835 - DNA, 11 bp, Unknown
  misc_feature (1)..( 11): Result.006 file - promoters50/4771737
ttgcaaataaa

SEQ ID NO: 191836 - DNA, 11 bp, Unknown
  misc_feature (1)..( 11): Result.006 file - promoters50/4771737
ctttcaataaa

SEQ ID NO: 191837 - DNA, 11 bp, Unknown
  misc_feature (1)..( 11): Result.006 file - promoters50/4771741
atgataataat

SEQ ID NO: 191838 - DNA, 9 bp, Unknown
  misc_feature (1)..( 9): Result.006 file - promoters50/4771741
taaaagaag

SEQ ID NO: 191839 - DNA, 9 bp, Unknown
  misc_feature (1)..( 9): Result.006 file - promoters50/4771741
taaaagaat

SEQ ID NO: 191840 - DNA, 9 bp, Unknown
  misc_feature (1)..( 9): Result.006 file - promoters50/4771741
gtaaataag

SEQ ID NO: 191841 - DNA, 12 bp, Unknown
  misc_feature (1)..( 12): Result.006 file - promoters50/4771741
cactttctctct

SEQ ID NO: 191842 - DNA, 12 bp, Unknown
  misc_feature (1)..( 12): Result.006 file - promoters50/4771741
aactttctagca

SEQ ID NO: 191843 - DNA, 12 bp, Unknown
  misc_feature (1)..( 12): Result.006 file - promoters50/4771741
cactctctctct

SEQ ID NO: 191844 - DNA, 10 bp, Unknown
  misc_feature (1)..( 10): Result.006 file - promoters50/4771741
cataagtatt

SEQ ID NO: 191845 - DNA, 10 bp, Unknown
  misc_feature (1)..( 10): Result.006 file - promoters50/4771741
tttaattatt

SEQ ID NO: 191846 - DNA, 10 bp, Unknown
  misc_feature (1)..( 10): Result.006 file - promoters50/4771741
tttaattggt

SEQ ID NO: 191847 - DNA, 8 bp, Unknown
  misc_feature (1)..( 8): Result.006 file - promoters50/4771741
aaaagaaa

SEQ ID NO: 191848 - DNA, 8 bp, Unknown
  misc_feature (1)..( 8): Result.006 file - promoters50/4771741
aaaataaa

SEQ ID NO: 191849 - DNA, 8 bp, Unknown
  misc_feature (1)..( 8): Result.006 file - promoters50/4771741
aaaaaaaa

SEQ ID NO: 191850 - DNA, 8 bp, Unknown
  misc_feature (1)..( 8): Result.006 file - promoters50/4771741
tataaatc

SEQ ID NO: 191851 - DNA, 8 bp, Unknown
  misc_feature (1)..( 8): Result.006 file - promoters50/4771741
tataaata

SEQ ID NO: 191852 - DNA, 8 bp, Unknown
  misc_feature (1)..( 8): Result.006 file - promoters50/4771741
tatatata

SEQ ID NO: 191853 - DNA, 8 bp, Unknown
  misc_feature (1)..( 8): Result.006 file - promoters50/4771741
ttttaact

SEQ ID NO: 191854 - DNA, 8 bp, Unknown
  misc_feature (1)..( 8): Result.006 file - promoters50/4771741
ttttaatt

SEQ ID NO: 191855 - DNA, 8 bp, Unknown
  misc_feature (1)..( 8): Result.006 file - promoters50/4771745
atttaatt

SEQ ID NO: 191856 - DNA, 8 bp, Unknown
  misc_feature (1)..( 8): Result.006 file - promoters50/4771745
tgataatg

SEQ ID NO: 191857 - DNA, 8 bp, Unknown
  misc_feature (1)..( 8): Result.006 file - promoters50/4771745
ggataatt

SEQ ID NO: 191858 - DNA, 8 bp, Unknown
  misc_feature (1)..( 8): Result.006 file - promoters50/4771785
ggatgatt

SEQ ID NO: 191859 - DNA, 10 bp, Unknown
  misc_feature (1)..( 10): Result.006 file - promoters50/4771785
ttattttaat

SEQ ID NO: 191860 - DNA, 10 bp, Unknown
  misc_feature (1)..( 10): Result.006 file - promoters50/4771785
gattttgaat

SEQ ID NO: 191861 - DNA, 10 bp, Unknown
  misc_feature (1)..( 10): Result.006 file - promoters50/4771785
atattttatc

SEQ ID NO: 191862 - DNA, 10 bp, Unknown
  misc_feature (1)..( 10): Result.006 file - promoters50/4771785
atatttaaaa

SEQ ID NO: 191863 - DNA, 12 bp, Unknown
  misc_feature (1)..( 12): Result.006 file - promoters50/4771785
gatatttataat

SEQ ID NO: 191864 - DNA, 12 bp, Unknown
  misc_feature (1)..( 12): Result.006 file - promoters50/4771785
gatattatagga

SEQ ID NO: 191865 - DNA, 12 bp, Unknown
  misc_feature (1)..( 12): Result.006 file - promoters50/4771785
aatatttgtaat

SEQ ID NO: 191866 - DNA, 12 bp, Unknown
  misc_feature (1)..( 12): Result.006 file - promoters50/4771785
atatttataata

SEQ ID NO: 191867 - DNA, 12 bp, Unknown
  misc_feature (1)..( 12): Result.006 file - promoters50/4771785
tctgatattata

SEQ ID NO: 191868 - DNA, 12 bp, Unknown
  misc_feature (1)..( 12): Result.006 file - promoters50/4771785
atatttgtaatt

SEQ ID NO: 191869 - DNA, 11 bp, Unknown
  misc_feature (1)..( 11): Result.006 file - promoters50/4771785
ataaatgagaa

SEQ ID NO: 191870 - DNA, 11 bp, Unknown
  misc_feature (1)..( 11): Result.006 file - promoters50/4771785
ataactgatga

SEQ ID NO: 191871 - DNA, 11 bp, Unknown
  misc_feature (1)..( 11): Result.006 file - promoters50/4771785
ttaaaagagaa

SEQ ID NO: 191872 - DNA, 9 bp, Unknown
  misc_feature (1)..( 9): Result.006 file - promoters50/4771785
tatatgtaa

SEQ ID NO: 191873 - DNA, 9 bp, Unknown
  misc_feature (1)..( 9): Result.006 file - promoters50/4771785
tatatttaa

SEQ ID NO: 191874 - DNA, 9 bp, Unknown
  misc_feature (1)..( 9): Result.006 file - promoters50/4771785
tggatttaa

SEQ ID NO: 191875 - DNA, 7 bp, Unknown
  misc_feature (1)..( 7): Result.006 file - promoters50/4771785
gatttat

SEQ ID NO: 191876 - DNA, 7 bp, Unknown
  misc_feature (1)..( 7): Result.006 file - promoters50/4771785
aatttat

SEQ ID NO: 191877 - DNA, 7 bp, Unknown
  misc_feature (1)..( 7): Result.006 file - promoters50/4771785
gatttat

SEQ ID NO: 191878 - DNA, 9 bp, Unknown
  misc_feature (1)..( 9): Result.006 file - promoters50/4771785
tctttttag

SEQ ID NO: 191879 - DNA, 9 bp, Unknown
  misc_feature (1)..( 9): Result.006 file - promoters50/4771785
tatttttac

SEQ ID NO: 191880 - DNA, 9 bp, Unknown
  misc_feature (1)..( 9): Result.006 file - promoters50/4771785
aattttttt

SEQ ID NO: 191881 - DNA, 8 bp, Unknown
  misc_feature (1)..( 8): Result.006 file - promoters50/4771785
tattttta

SEQ ID NO: 191882 - DNA, 8 bp, Unknown
  misc_feature (1)..( 8): Result.006 file - promoters50/4771785
tatattta

SEQ ID NO: 191883 - DNA, 8 bp, Unknown
  misc_feature (1)..( 8): Result.006 file - promoters50/4771785
tattttat

SEQ ID NO: 191884 - DNA, 9 bp, Unknown
  misc_feature (1)..( 9): Result.006 file - promoters50/4771785
atgtatttt

SEQ ID NO: 191885 - DNA, 9 bp, Unknown
  misc_feature (1)..( 9): Result.006 file - promoters50/4771785
aattatttt

SEQ ID NO: 191886 - DNA, 9 bp, Unknown
  misc_feature (1)..( 9): Result.006 file - promoters50/4771785
atggattta

SEQ ID NO: 191887 - DNA, 9 bp, Unknown
  misc_feature (1)..( 9): Result.006 file - promoters50/4771785
ttggatttt

SEQ ID NO: 191888 - DNA, 9 bp, Unknown
  misc_feature (1)..( 9): Result.006 file - promoters50/4771785
agaaataaa

SEQ ID NO: 191889 - DNA, 9 bp, Unknown
  misc_feature (1)..( 9): Result.006 file - promoters50/4771785
agaaatata

SEQ ID NO: 191890 - DNA, 9 bp, Unknown
  misc_feature (1)..( 9): Result.006 file - promoters50/4771785
ggaactata

SEQ ID NO: 191891 - DNA, 8 bp, Unknown
  misc_feature (1)..( 8): Result.006 file - promoters50/4771785
tcgtgaat

SEQ ID NO: 191892 - DNA, 8 bp, Unknown
  misc_feature (1)..( 8): Result.006 file - promoters50/4771785
aagtgaat

SEQ ID NO: 191893 - DNA, 8 bp, Unknown
  misc_feature (1)..( 8): Result.006 file - promoters50/4771785
aagagaag

SEQ ID NO: 191894 - DNA, 14 bp, Unknown
  misc_feature (1)..( 14): Result.006 file - promoters50/4771785
ttaacacgatttga

SEQ ID NO: 191895 - DNA, 14 bp, Unknown
  misc_feature (1)..( 14): Result.006 file - promoters50/4771785
ttaacaattttttt

SEQ ID NO: 191896 - DNA, 14 bp, Unknown
  misc_feature (1)..( 14): Result.006 file - promoters50/4771785
ttaataatttattt

SEQ ID NO: 191897 - DNA, 14 bp, Unknown
  misc_feature (1)..( 14): Result.006 file - promoters50/4771785
ttttagatttattt

SEQ ID NO: 191898 - DNA, 14 bp, Unknown
  misc_feature (1)..( 14): Result.006 file - promoters50/4771785
ttaacaattttttt

SEQ ID NO: 191899 - DNA, 14 bp, Unknown
  misc_feature (1)..( 14): Result.006 file - promoters50/4771785
ttaataatttattt

SEQ ID NO: 191900 - DNA, 13 bp, Unknown
  misc_feature (1)..( 13): Result.006 file - promoters50/4771785
tatcatcactatt

SEQ ID NO: 191901 - DNA, 13 bp, Unknown
  misc_feature (1)..( 13): Result.006 file - promoters50/4771785
ttgaatcaatatt

SEQ ID NO: 191902 - DNA, 13 bp, Unknown
  misc_feature (1)..( 13): Result.006 file - promoters50/4771785
ttgattcaaaatt

SEQ ID NO: 191903 - DNA, 8 bp, Unknown
  misc_feature (1)..( 8): Result.006 file - promoters50/4771785
tgagaaag

SEQ ID NO: 191904 - DNA, 8 bp, Unknown
  misc_feature (1)..( 8): Result.006 file - promoters50/4771785
tgaaaaaa

SEQ ID NO: 191905 - DNA, 8 bp, Unknown
  misc_feature (1)..( 8): Result.006 file - promoters50/4771785
ctaaaaaa

SEQ ID NO: 191906 - DNA, 9 bp, Unknown
  misc_feature (1)..( 9): Result.006 file - promoters50/4771785
ggtatttct

SEQ ID NO: 191907 - DNA, 9 bp, Unknown
  misc_feature (1)..( 9): Result.006 file - promoters50/4771785
taaatttct

SEQ ID NO: 191908 - DNA, 9 bp, Unknown
  misc_feature (1)..( 9): Result.006 file - promoters50/4771789
taactttca

SEQ ID NO: 191909 - DNA, 14 bp, Unknown
  misc_feature (1)..( 14): Result.006 file - promoters50/4771789
gtatttaagttttt

SEQ ID NO: 191910 - DNA, 14 bp, Unknown
  misc_feature (1)..( 14): Result.006 file - promoters50/4771789
ttctatgagttttt

SEQ ID NO: 191911 - DNA, 14 bp, Unknown
  misc_feature (1)..( 14): Result.006 file - promoters50/4771789
gtacttaagttttg

SEQ ID NO: 191912 - DNA, 12 bp, Unknown
  misc_feature (1)..( 12): Result.006 file - promoters50/4771789
tttttgtttgtt

SEQ ID NO: 191913 - DNA, 12 bp, Unknown
  misc_feature (1)..( 12): Result.006 file - promoters50/4771789
tttttttttgtt

SEQ ID NO: 191914 - DNA, 12 bp, Unknown
  misc_feature (1)..( 12): Result.006 file - promoters50/4771789
gttttgtccgat

SEQ ID NO: 191915 - DNA, 8 bp, Unknown
  misc_feature (1)..( 8): Result.006 file - promoters50/4771789
aaataaat

SEQ ID NO: 191916 - DNA, 8 bp, Unknown
  misc_feature (1)..( 8): Result.006 file - promoters50/4771789
aaataaat

SEQ ID NO: 191917 - DNA, 8 bp, Unknown
  misc_feature (1)..( 8): Result.006 file - promoters50/4771789
tgataaat

SEQ ID NO: 191918 - DNA, 8 bp, Unknown
  misc_feature (1)..( 8): Result.006 file - promoters50/4771789
aaccaaaa

SEQ ID NO: 191919 - DNA, 8 bp, Unknown
  misc_feature (1)..( 8): Result.006 file - promoters50/4771789
aactaaac

SEQ ID NO: 191920 - DNA, 8 bp, Unknown
  misc_feature (1)..( 8): Result.006 file - promoters50/4771793
caccaaaa

SEQ ID NO: 191921 - DNA, 8 bp, Unknown
  misc_feature (1)..( 8): Result.006 file - promoters50/4771793
tacattta

SEQ ID NO: 191922 - DNA, 8 bp, Unknown
  misc_feature (1)..( 8): Result.006 file - promoters50/4771793
tacttttt

SEQ ID NO: 191923 - DNA, 8 bp, Unknown
  misc_feature (1)..( 8): Result.006 file - promoters50/4771793
cccttttt

SEQ ID NO: 191924 - DNA, 9 bp, Unknown
  misc_feature (1)..( 9): Result.006 file - promoters50/4771793
ttaaaaaaa

SEQ ID NO: 191925 - DNA, 9 bp, Unknown
  misc_feature (1)..( 9): Result.006 file - promoters50/4771793
ttaacaaaa

SEQ ID NO: 191926 - DNA, 9 bp, Unknown
  misc_feature (1)..( 9): Result.006 file - promoters50/4771793
gtaataaag

SEQ ID NO: 191927 - DNA, 10 bp, Unknown
  misc_feature (1)..( 10): Result.006 file - promoters50/4771793
aattgaaaaa

SEQ ID NO: 191928 - DNA, 10 bp, Unknown
  misc_feature (1)..( 10): Result.006 file - promoters50/4771793
tgttgagaaa

SEQ ID NO: 191929 - DNA, 10 bp, Unknown
  misc_feature (1)..( 10): Result.006 file - promoters50/4771808
aattgaagac

SEQ ID NO: 191930 - DNA, 9 bp, Unknown
  misc_feature (1)..( 9): Result.006 file - promoters50/4771808
caaacaaaa

SEQ ID NO: 191931 - DNA, 9 bp, Unknown
  misc_feature (1)..( 9): Result.006 file - promoters50/4771808
gaaactaaa

SEQ ID NO: 191932 - DNA, 9 bp, Unknown
  misc_feature (1)..( 9): Result.006 file - promoters50/4771872
gaaactatg

SEQ ID NO: 191933 - DNA, 13 bp, Unknown
  misc_feature (1)..( 13): Result.006 file - promoters50/4771872
aattaaattgtga

SEQ ID NO: 191934 - DNA, 13 bp, Unknown
  misc_feature (1)..( 13): Result.006 file - promoters50/4771872
aaagaaagtgttt

SEQ ID NO: 191935 - DNA, 13 bp, Unknown
  misc_feature (1)..( 13): Result.006 file - promoters50/4771872
tgagaaattgagg

SEQ ID NO: 191936 - DNA, 13 bp, Unknown
  misc_feature (1)..( 13): Result.006 file - promoters50/4771872
cattaaattaatt

SEQ ID NO: 191937 - DNA, 13 bp, Unknown
  misc_feature (1)..( 13): Result.006 file - promoters50/4771872
aatagaagtcttt

SEQ ID NO: 191938 - DNA, 13 bp, Unknown
  misc_feature (1)..( 13): Result.006 file - promoters50/4771872
catgaaacttttt

SEQ ID NO: 191939 - DNA, 13 bp, Unknown
  misc_feature (1)..( 13): Result.006 file - promoters50/4771872
gattaaaccaaac

SEQ ID NO: 191940 - DNA, 13 bp, Unknown
  misc_feature (1)..( 13): Result.006 file - promoters50/4771872
attgtttatgctt

SEQ ID NO: 191941 - DNA, 13 bp, Unknown
  misc_feature (1)..( 13): Result.006 file - promoters50/4771872
tatgtttagtctc

SEQ ID NO: 191942 - DNA, 13 bp, Unknown
  misc_feature (1)..( 13): Result.006 file - promoters50/4771872
attctttcttagg

SEQ ID NO: 191943 - DNA, 13 bp, Unknown
  misc_feature (1)..( 13): Result.006 file - promoters50/4771872
agagtttagagaa

SEQ ID NO: 191944 - DNA, 13 bp, Unknown
  misc_feature (1)..( 13): Result.006 file - promoters50/4771872
aaattttaaagaa

SEQ ID NO: 191945 - DNA, 13 bp, Unknown
  misc_feature (1)..( 13): Result.006 file - promoters50/4771872
attgtaaaaagaa

SEQ ID NO: 191946 - DNA, 8 bp, Unknown
  misc_feature (1)..( 8): Result.006 file - promoters50/4771872
agataaga

SEQ ID NO: 191947 - DNA, 8 bp, Unknown
  misc_feature (1)..( 8): Result.006 file - promoters50/4771872
ggataagg

SEQ ID NO: 191948 - DNA, 8 bp, Unknown
  misc_feature (1)..( 8): Result.006 file - promoters50/4771872
ggataagt

SEQ ID NO: 191949 - DNA, 8 bp, Unknown
  misc_feature (1)..( 8): Result.006 file - promoters50/4771872
ggaaaagc

SEQ ID NO: 191950 - DNA, 8 bp, Unknown
  misc_feature (1)..( 8): Result.006 file - promoters50/4771872
gaaaaagc

SEQ ID NO: 191951 - DNA, 8 bp, Unknown
  misc_feature (1)..( 8): Result.006 file - promoters50/4771879
tgataagt

SEQ ID NO: 191952 - DNA, 12 bp, Unknown
  misc_feature (1)..( 12): Result.006 file - promoters50/4771879
gtcctatgtaat

SEQ ID NO: 191953 - DNA, 12 bp, Unknown
  misc_feature (1)..( 12): Result.006 file - promoters50/4771879
tttatatttaat

SEQ ID NO: 191954 - DNA, 12 bp, Unknown
  misc_feature (1)..( 12): Result.006 file - promoters50/4771879
gtcgtatctaag

SEQ ID NO: 191955 - DNA, 8 bp, Unknown
  misc_feature (1)..( 8): Result.006 file - promoters50/4771879
ataaattg

SEQ ID NO: 191956 - DNA, 8 bp, Unknown
  misc_feature (1)..( 8): Result.006 file - promoters50/4771879
gtaatttg

SEQ ID NO: 191957 - DNA, 8 bp, Unknown
  misc_feature (1)..( 8): Result.006 file - promoters50/4771883
gtaattta

SEQ ID NO: 191958 - DNA, 18 bp, Unknown
  misc_feature (1)..( 18): Result.006 file - promoters50/4771883
aagacatacatataacat

SEQ ID NO: 191959 - DNA, 18 bp, Unknown
  misc_feature (1)..( 18): Result.006 file - promoters50/4771883
atattatatatatatata

SEQ ID NO: 191960 - DNA, 18 bp, Unknown
  misc_feature (1)..( 18): Result.006 file - promoters50/4771883
atatttttcatttaattg

SEQ ID NO: 191961 - DNA, 18 bp, Unknown
  misc_feature (1)..( 18): Result.006 file - promoters50/4771883
atatcatatatatatagc

SEQ ID NO: 191962 - DNA, 18 bp, Unknown
  misc_feature (1)..( 18): Result.006 file - promoters50/4771883
ttcgaccaaatttatcat

SEQ ID NO: 191963 - DNA, 10 bp, Unknown
  misc_feature (1)..( 10): Result.006 file - promoters50/4771883
atttacaaag

SEQ ID NO: 191964 - DNA, 10 bp, Unknown
  misc_feature (1)..( 10): Result.006 file - promoters50/4771883
aaatacaaag

SEQ ID NO: 191965 - DNA, 10 bp, Unknown
  misc_feature (1)..( 10): Result.006 file - promoters50/4771883
aactacaaat

SEQ ID NO: 191966 - DNA, 10 bp, Unknown
  misc_feature (1)..( 10): Result.006 file - promoters50/4771883
aaataaaaat

SEQ ID NO: 191967 - DNA, 9 bp, Unknown
  misc_feature (1)..( 9): Result.006 file - promoters50/4771883
caacaatgg

SEQ ID NO: 191968 - DNA, 9 bp, Unknown
  misc_feature (1)..( 9): Result.006 file - promoters50/4771883
caataataa

SEQ ID NO: 191969 - DNA, 9 bp, Unknown
  misc_feature (1)..( 9): Result.006 file - promoters50/4771883
aaataatta

SEQ ID NO: 191970 - DNA, 9 bp, Unknown
  misc_feature (1)..( 9): Result.006 file - promoters50/4771883
atatattta

SEQ ID NO: 191971 - DNA, 8 bp, Unknown
  misc_feature (1)..( 8): Result.006 file - promoters50/4771883
ttggttta

SEQ ID NO: 191972 - DNA, 8 bp, Unknown
  misc_feature (1)..( 8): Result.006 file - promoters50/4771883
ttgttttg

SEQ ID NO: 191973 - DNA, 8 bp, Unknown
  misc_feature (1)..( 8): Result.006 file - promoters50/4771883
acggttta

SEQ ID NO: 191974 - DNA, 8 bp, Unknown
  misc_feature (1)..( 8): Result.006 file - promoters50/4771895
gcggtttc

SEQ ID NO: 191975 - DNA, 13 bp, Unknown
  misc_feature (1)..( 13): Result.006 file - promoters50/4771895
tattcgatctttt

SEQ ID NO: 191976 - DNA, 13 bp, Unknown
  misc_feature (1)..( 13): Result.006 file - promoters50/4771895
aattagatttttt

SEQ ID NO: 191977 - DNA, 13 bp, Unknown
  misc_feature (1)..( 13): Result.006 file - promoters50/4771895
atagagatcttta

SEQ ID NO: 191978 - DNA, 13 bp, Unknown
  misc_feature (1)..( 13): Result.006 file - promoters50/4771895
aattggatccgaa

SEQ ID NO: 191979 - DNA, 13 bp, Unknown
  misc_feature (1)..( 13): Result.006 file - promoters50/4771895
atttacattctat

SEQ ID NO: 191980 - DNA, 16 bp, Unknown
  misc_feature (1)..( 16): Result.006 file - promoters50/4771895
ttgatatcaaactaat

SEQ ID NO: 191981 - DNA, 16 bp, Unknown
  misc_feature (1)..( 16): Result.006 file - promoters50/4771895
tgtcacaaaaactaga

SEQ ID NO: 191982 - DNA, 15 bp, Unknown
  misc_feature (1)..( 15): Result.006 file - promoters50/4771895
aaagagaaaacaaga

SEQ ID NO: 191983 - DNA, 16 bp, Unknown
  misc_feature (1)..( 16): Result.006 file - promoters50/4771895
tattcaaaaatctaaa

SEQ ID NO: 191984 - DNA, 17 bp, Unknown
  misc_feature (1)..( 17): Result.006 file - promoters50/4771903
ttatccaataatctaca

SEQ ID NO: 191985 - DNA, 11 bp, Unknown
  misc_feature (1)..( 11): Result.006 file - promoters50/4771903
ttcttcttttt

SEQ ID NO: 191986 - DNA, 11 bp, Unknown
  misc_feature (1)..( 11): Result.006 file - promoters50/4771903
ttcttatttta

SEQ ID NO: 191987 - DNA, 12 bp, Unknown
  misc_feature (1)..( 12): Result.006 file - promoters50/4771903
cgcttccttttc

SEQ ID NO: 191988 - DNA, 12 bp, Unknown
  misc_feature (1)..( 12): Result.006 file - promoters50/4771903
taccatattttc

SEQ ID NO: 191989 - DNA, 12 bp, Unknown
  misc_feature (1)..( 12): Result.006 file - promoters50/4771903
aaaaagatttta

SEQ ID NO: 191990 - DNA, 12 bp, Unknown
  misc_feature (1)..( 12): Result.006 file - promoters50/4771903
ttgtttccttca

SEQ ID NO: 191991 - DNA, 15 bp, Unknown
  misc_feature (1)..( 15): Result.006 file - promoters50/4771903
attttaaaaaattaa

SEQ ID NO: 191992 - DNA, 15 bp, Unknown
  misc_feature (1)..( 15): Result.006 file - promoters50/4771903
ttgaatcaaaattat

SEQ ID NO: 191993 - DNA, 15 bp, Unknown
  misc_feature (1)..( 15): Result.006 file - promoters50/4771903
cttcctacaaattat

SEQ ID NO: 191994 - DNA, 15 bp, Unknown
  misc_feature (1)..( 15): Result.006 file - promoters50/4771903
tagtgaggaaagtat

SEQ ID NO: 191995 - DNA, 15 bp, Unknown
  misc_feature (1)..( 15): Result.006 file - promoters50/4771903
tacgattacaattat

SEQ ID NO: 191996 - DNA, 15 bp, Unknown
  misc_feature (1)..( 15): Result.006 file - promoters50/4771903
ttgaatctaaatcat

SEQ ID NO: 191997 - DNA, 10 bp, Unknown
  misc_feature (1)..( 10): Result.006 file - promoters50/4771903
tgttatttga

SEQ ID NO: 191998 - DNA, 10 bp, Unknown
  misc_feature (1)..( 10): Result.006 file - promoters50/4771903
aggtatttga

SEQ ID NO: 191999 - DNA, 10 bp, Unknown
  misc_feature (1)..( 10): Result.006 file - promoters50/4771903
aataatttga

SEQ ID NO: 192000 - DNA, 10 bp, Unknown
  misc_feature (1)..( 10): Result.006 file - promoters50/4771903
acttatttta

SEQ ID NO: 192001 - DNA, 10 bp, Unknown
  misc_feature (1)..( 10): Result.006 file - promoters50/4771903
acaaatttgc

SEQ ID NO: 192002 - DNA, 10 bp, Unknown
  misc_feature (1)..( 10): Result.006 file - promoters50/4771903
acatattttt

SEQ ID NO: 192003 - DNA, 11 bp, Unknown
  misc_feature (1)..( 11): Result.006 file - promoters50/4771903
gctaaaagtaa

SEQ ID NO: 192004 - DNA, 11 bp, Unknown
  misc_feature (1)..( 11): Result.006 file - promoters50/4771903
tctaaaaattg

SEQ ID NO: 192005 - DNA, 11 bp, Unknown
  misc_feature (1)..( 11): Result.006 file - promoters50/4771903
gctaaaataaa

SEQ ID NO: 192006 - DNA, 11 bp, Unknown
  misc_feature (1)..( 11): Result.006 file - promoters50/4771903
aataaaaattg

SEQ ID NO: 192007 - DNA, 11 bp, Unknown
  misc_feature (1)..( 11): Result.006 file - promoters50/4771903
tataaaataca

SEQ ID NO: 192008 - DNA, 11 bp, Unknown
  misc_feature (1)..( 11): Result.006 file - promoters50/4771903
gagaaaattga

SEQ ID NO: 192009 - DNA, 9 bp, Unknown
  misc_feature (1)..( 9): Result.006 file - promoters50/4771903
tctttttat

SEQ ID NO: 192010 - DNA, 9 bp, Unknown
  misc_feature (1)..( 9): Result.006 file - promoters50/4771903
attttctat

SEQ ID NO: 192011 - DNA, 9 bp, Unknown
  misc_feature (1)..( 9): Result.006 file - promoters50/4771903
cgtttttac

SEQ ID NO: 192012 - DNA, 9 bp, Unknown
  misc_feature (1)..( 9): Result.006 file - promoters50/4771903
agattttat

SEQ ID NO: 192013 - DNA, 9 bp, Unknown
  misc_feature (1)..( 9): Result.006 file - promoters50/4771903
attttctta

SEQ ID NO: 192014 - DNA, 9 bp, Unknown
  misc_feature (1)..( 9): Result.006 file - promoters50/4771903
tgtttcctt

SEQ ID NO: 192015 - DNA, 9 bp, Unknown
  misc_feature (1)..( 9): Result.006 file - promoters50/4771903
cttttccta

SEQ ID NO: 192016 - DNA, 9 bp, Unknown
  misc_feature (1)..( 9): Result.006 file - promoters50/4771903
ggtttttgc

SEQ ID NO: 192017 - DNA, 10 bp, Unknown
  misc_feature (1)..( 10): Result.006 file - promoters50/4771903
gaaagttttt

SEQ ID NO: 192018 - DNA, 10 bp, Unknown
  misc_feature (1)..( 10): Result.006 file - promoters50/4771903
gaaagtatcg

SEQ ID NO: 192019 - DNA, 10 bp, Unknown
  misc_feature (1)..( 10): Result.006 file - promoters50/4771903
aaaactttta

SEQ ID NO: 192020 - DNA, 10 bp, Unknown
  misc_feature (1)..( 10): Result.006 file - promoters50/4771903
aaaattattt

SEQ ID NO: 192021 - DNA, 10 bp, Unknown
  misc_feature (1)..( 10): Result.006 file - promoters50/4771903
acaattatat

SEQ ID NO: 192022 - DNA, 10 bp, Unknown
  misc_feature (1)..( 10): Result.006 file - promoters50/4771903
gatatttttt

SEQ ID NO: 192023 - DNA, 9 bp, Unknown
  misc_feature (1)..( 9): Result.006 file - promoters50/4771903
caaaattat

SEQ ID NO: 192024 - DNA, 9 bp, Unknown
  misc_feature (1)..( 9): Result.006 file - promoters50/4771903
aaaaattgt

SEQ ID NO: 192025 - DNA, 9 bp, Unknown
  misc_feature (1)..( 9): Result.006 file - promoters50/4771903
aaaaatata

SEQ ID NO: 192026 - DNA, 9 bp, Unknown
  misc_feature (1)..( 9): Result.006 file - promoters50/4771903
aaaaattgg

SEQ ID NO: 192027 - DNA, 9 bp, Unknown
  misc_feature (1)..( 9): Result.006 file - promoters50/4771903
gaaaattga

SEQ ID NO: 192028 - DNA, 9 bp, Unknown
  misc_feature (1)..( 9): Result.006 file - promoters50/4771911
taaaataaa

SEQ ID NO: 192029 - DNA, 13 bp, Unknown
  misc_feature (1)..( 13): Result.006 file - promoters50/4771911
tatacaaatacat

SEQ ID NO: 192030 - DNA, 13 bp, Unknown
  misc_feature (1)..( 13): Result.006 file - promoters50/4771911
gaaacaaaaacat

SEQ ID NO: 192031 - DNA, 13 bp, Unknown
  misc_feature (1)..( 13): Result.006 file - promoters50/4771911
gaaagaaagcttt

SEQ ID NO: 192032 - DNA, 9 bp, Unknown
  misc_feature (1)..( 9): Result.006 file - promoters50/4771911
aaaataaaa

SEQ ID NO: 192033 - DNA, 9 bp, Unknown
  misc_feature (1)..( 9): Result.006 file - promoters50/4771911
gaaatgaaa

SEQ ID NO: 192034 - DNA, 9 bp, Unknown
  misc_feature (1)..( 9): Result.006 file - promoters50/4771911
aaaataaaa

SEQ ID NO: 192035 - DNA, 8 bp, Unknown
  misc_feature (1)..( 8): Result.006 file - promoters50/4771911
aaaatatc

SEQ ID NO: 192036 - DNA, 8 bp, Unknown
  misc_feature (1)..( 8): Result.006 file - promoters50/4771911
gaaatatc

SEQ ID NO: 192037 - DNA, 8 bp, Unknown
  misc_feature (1)..( 8): Result.006 file - promoters50/4771911
aaaataaa

SEQ ID NO: 192038 - DNA, 8 bp, Unknown
  misc_feature (1)..( 8): Result.006 file - promoters50/4771911
aacaaaat

SEQ ID NO: 192039 - DNA, 8 bp, Unknown
  misc_feature (1)..( 8): Result.006 file - promoters50/4771911
aactaaac

SEQ ID NO: 192040 - DNA, 8 bp, Unknown
  misc_feature (1)..( 8): Result.006 file - promoters50/4771911
cacaaaat

SEQ ID NO: 192041 - DNA, 13 bp, Unknown
  misc_feature (1)..( 13): Result.006 file - promoters50/4771911
tttagaaaaataa

SEQ ID NO: 192042 - DNA, 13 bp, Unknown
  misc_feature (1)..( 13): Result.006 file - promoters50/4771911
tttggaaaagaaa

SEQ ID NO: 192043 - DNA, 13 bp, Unknown
  misc_feature (1)..( 13): Result.006 file - promoters50/4771911
aagggaaatgaaa

SEQ ID NO: 192044 - DNA, 8 bp, Unknown
  misc_feature (1)..( 8): Result.006 file - promoters50/4771911
aaatttat

SEQ ID NO: 192045 - DNA, 8 bp, Unknown
  misc_feature (1)..( 8): Result.006 file - promoters50/4771911
ttatttat

SEQ ID NO: 192046 - DNA, 8 bp, Unknown
  misc_feature (1)..( 8): Result.006 file - promoters50/4771911
ttatttag

SEQ ID NO: 192047 - DNA, 13 bp, Unknown
  misc_feature (1)..( 13): Result.006 file - promoters50/4771911
aaaaaaagaaaaa

SEQ ID NO: 192048 - DNA, 13 bp, Unknown
  misc_feature (1)..( 13): Result.006 file - promoters50/4771911
aaaaaaagaaaaa

SEQ ID NO: 192049 - DNA, 13 bp, Unknown
  misc_feature (1)..( 13): Result.006 file - promoters50/4771913
gccaaaagagtaa

SEQ ID NO: 192050 - DNA, 12 bp, Unknown
  misc_feature (1)..( 12): Result.006 file - promoters50/4771913
caaagatatatc

SEQ ID NO: 192051 - DNA, 12 bp, Unknown
  misc_feature (1)..( 12): Result.006 file - promoters50/4771913
taaaaatatatt

SEQ ID NO: 192052 - DNA, 12 bp, Unknown
  misc_feature (1)..( 12): Result.006 file - promoters50/4771913
caaagaaagaca

SEQ ID NO: 192053 - DNA, 12 bp, Unknown
  misc_feature (1)..( 12): Result.006 file - promoters50/4771913
caaagattacat

SEQ ID NO: 192054 - DNA, 12 bp, Unknown
  misc_feature (1)..( 12): Result.006 file - promoters50/4771913
gacaaatttatt

SEQ ID NO: 192055 - DNA, 12 bp, Unknown
  misc_feature (1)..( 12): Result.006 file - promoters50/4771913
aaaacattccaa

SEQ ID NO: 192056 - DNA, 10 bp, Unknown
  misc_feature (1)..( 10): Result.006 file - promoters50/4771913
cacaaaaaga

SEQ ID NO: 192057 - DNA, 10 bp, Unknown
  misc_feature (1)..( 10): Result.006 file - promoters50/4771913
tacaaaaaaa

SEQ ID NO: 192058 - DNA, 10 bp, Unknown
  misc_feature (1)..( 10): Result.006 file - promoters50/4771913
gacaaaaaaa

SEQ ID NO: 192059 - DNA, 10 bp, Unknown
  misc_feature (1)..( 10): Result.006 file - promoters50/4771913
cgcaaaaatt

SEQ ID NO: 192060 - DNA, 10 bp, Unknown
  misc_feature (1)..( 10): Result.006 file - promoters50/4771913
cacaaatatc

SEQ ID NO: 192061 - DNA, 10 bp, Unknown
  misc_feature (1)..( 10): Result.006 file - promoters50/4771913
gtaaaaaaga

SEQ ID NO: 192062 - DNA, 11 bp, Unknown
  misc_feature (1)..( 11): Result.006 file - promoters50/4771928
attaaataaat

SEQ ID NO: 192063 - DNA, 16 bp, Unknown
  misc_feature (1)..( 16): Result.006 file - promoters50/4771928
agaactactattcgtg

SEQ ID NO: 192064 - DNA, 16 bp, Unknown
  misc_feature (1)..( 16): Result.006 file - promoters50/4771928
agaaatacaattttgt

SEQ ID NO: 192065 - DNA, 16 bp, Unknown
  misc_feature (1)..( 16): Result.006 file - promoters50/4771928
aagtcagctatttgtg

SEQ ID NO: 192066 - DNA, 16 bp, Unknown
  misc_feature (1)..( 16): Result.006 file - promoters50/4771928
ggtcttacaatttttt

SEQ ID NO: 192067 - DNA, 16 bp, Unknown
  misc_feature (1)..( 16): Result.006 file - promoters50/4771928
tttgataaaaaatata

SEQ ID NO: 192068 - DNA, 8 bp, Unknown
  misc_feature (1)..( 8): Result.006 file - promoters50/4771928
gtttttgt

SEQ ID NO: 192069 - DNA, 8 bp, Unknown
  misc_feature (1)..( 8): Result.006 file - promoters50/4771928
atttttgg

SEQ ID NO: 192070 - DNA, 8 bp, Unknown
  misc_feature (1)..( 8): Result.006 file - promoters50/4771928
acttttgg

SEQ ID NO: 192071 - DNA, 8 bp, Unknown
  misc_feature (1)..( 8): Result.006 file - promoters50/4771928
attgttgt

SEQ ID NO: 192072 - DNA, 8 bp, Unknown
  misc_feature (1)..( 8): Result.006 file - promoters50/4771928
aataaatc

SEQ ID NO: 192073 - DNA, 8 bp, Unknown
  misc_feature (1)..( 8): Result.006 file - promoters50/4771928
tataaatt

SEQ ID NO: 192074 - DNA, 8 bp, Unknown
  misc_feature (1)..( 8): Result.006 file - promoters50/4771928
aatcaatc

SEQ ID NO: 192075 - DNA, 8 bp, Unknown
  misc_feature (1)..( 8): Result.006 file - promoters50/4771928
aatccatc

SEQ ID NO: 192076 - DNA, 10 bp, Unknown
  misc_feature (1)..( 10): Result.006 file - promoters50/4771928
ttgcaaaaaa

SEQ ID NO: 192077 - DNA, 10 bp, Unknown
  misc_feature (1)..( 10): Result.006 file - promoters50/4771928
tttcaaaaaa

SEQ ID NO: 192078 - DNA, 10 bp, Unknown
  misc_feature (1)..( 10): Result.006 file - promoters50/4771928
ttttaaaaga

SEQ ID NO: 192079 - DNA, 10 bp, Unknown
  misc_feature (1)..( 10): Result.006 file - promoters50/4771944
cttcacaaac

SEQ ID NO: 192080 - DNA, 13 bp, Unknown
  misc_feature (1)..( 13): Result.006 file - promoters50/4771944
ttaagtaaaaact

SEQ ID NO: 192081 - DNA, 13 bp, Unknown
  misc_feature (1)..( 13): Result.006 file - promoters50/4771944
ttaaataaaaaac

SEQ ID NO: 192082 - DNA, 13 bp, Unknown
  misc_feature (1)..( 13): Result.006 file - promoters50/4771944
gacaaaaaaaact

SEQ ID NO: 192083 - DNA, 16 bp, Unknown
  misc_feature (1)..( 16): Result.006 file - promoters50/4771944
tacttttttttttttg

SEQ ID NO: 192084 - DNA, 16 bp, Unknown
  misc_feature (1)..( 16): Result.006 file - promoters50/4771944
tactgtttttcattct

SEQ ID NO: 192085 - DNA, 16 bp, Unknown
  misc_feature (1)..( 16): Result.006 file - promoters50/4771952
taacgtttgtcaatct

SEQ ID NO: 192086 - DNA, 8 bp, Unknown
  misc_feature (1)..( 8): Result.006 file - promoters50/4771952
aacaaatt

SEQ ID NO: 192087 - DNA, 8 bp, Unknown
  misc_feature (1)..( 8): Result.006 file - promoters50/4771952
ctcaaatt

SEQ ID NO: 192088 - DNA, 8 bp, Unknown
  misc_feature (1)..( 8): Result.006 file - promoters50/4771956
ctcacatt

SEQ ID NO: 192089 - DNA, 12 bp, Unknown
  misc_feature (1)..( 12): Result.006 file - promoters50/4771956
aaattattttat

SEQ ID NO: 192090 - DNA, 12 bp, Unknown
  misc_feature (1)..( 12): Result.006 file - promoters50/4771956
tttttaatttaa

SEQ ID NO: 192091 - DNA, 12 bp, Unknown
  misc_feature (1)..( 12): Result.006 file - promoters50/4771956
gaaacgttttat

SEQ ID NO: 192092 - DNA, 12 bp, Unknown
  misc_feature (1)..( 12): Result.006 file - promoters50/4771956
aaactatttaaa

SEQ ID NO: 192093 - DNA, 12 bp, Unknown
  misc_feature (1)..( 12): Result.006 file - promoters50/4771956
caaccattcgca

SEQ ID NO: 192094 - DNA, 10 bp, Unknown
  misc_feature (1)..( 10): Result.006 file - promoters50/4771956
taaataagta

SEQ ID NO: 192095 - DNA, 10 bp, Unknown
  misc_feature (1)..( 10): Result.006 file - promoters50/4771956
tatataagtt

SEQ ID NO: 192096 - DNA, 10 bp, Unknown
  misc_feature (1)..( 10): Result.006 file - promoters50/4771956
taaataatat

SEQ ID NO: 192097 - DNA, 10 bp, Unknown
  misc_feature (1)..( 10): Result.006 file - promoters50/4771956
aaaaaaatta

SEQ ID NO: 192098 - DNA, 10 bp, Unknown
  misc_feature (1)..( 10): Result.006 file - promoters50/4771960
ataatcatat

SEQ ID NO: 192099 - DNA, 10 bp, Unknown
  misc_feature (1)..( 10): Result.006 file - promoters50/4771960
ttaatagttg

SEQ ID NO: 192100 - DNA, 10 bp, Unknown
  misc_feature (1)..( 10): Result.006 file - promoters50/4771960
taaatacttg

SEQ ID NO: 192101 - DNA, 10 bp, Unknown
  misc_feature (1)..( 10): Result.006 file - promoters50/4771960
caaatacatg

SEQ ID NO: 192102 - DNA, 10 bp, Unknown
  misc_feature (1)..( 10): Result.006 file - promoters50/4771960
acactacttg

SEQ ID NO: 192103 - DNA, 10 bp, Unknown
  misc_feature (1)..( 10): Result.006 file - promoters50/4771960
catataattg

SEQ ID NO: 192104 - DNA, 10 bp, Unknown
  misc_feature (1)..( 10): Result.006 file - promoters50/4771960
caaattcatg

SEQ ID NO: 192105 - DNA, 16 bp, Unknown
  misc_feature (1)..( 16): Result.006 file - promoters50/4771960
caaaaataaaagtgaa

SEQ ID NO: 192106 - DNA, 16 bp, Unknown
  misc_feature (1)..( 16): Result.006 file - promoters50/4771960
caaaaacaaaaaaaaa

SEQ ID NO: 192107 - DNA, 16 bp, Unknown
  misc_feature (1)..( 16): Result.006 file - promoters50/4771960
tcttaatagtatgttg

SEQ ID NO: 192108 - DNA, 16 bp, Unknown
  misc_feature (1)..( 16): Result.006 file - promoters50/4771960
aaaacttaaatgtgaa

SEQ ID NO: 192109 - DNA, 16 bp, Unknown
  misc_feature (1)..( 16): Result.006 file - promoters50/4771960
tttcaacaacttcttc

SEQ ID NO: 192110 - DNA, 16 bp, Unknown
  misc_feature (1)..( 16): Result.006 file - promoters50/4771960
aatttttaaatcagaa

SEQ ID NO: 192111 - DNA, 13 bp, Unknown
  misc_feature (1)..( 13): Result.006 file - promoters50/4771960
gtaatattacatc

SEQ ID NO: 192112 - DNA, 13 bp, Unknown
  misc_feature (1)..( 13): Result.006 file - promoters50/4771960
tatacattaaatc

SEQ ID NO: 192113 - DNA, 13 bp, Unknown
  misc_feature (1)..( 13): Result.006 file - promoters50/4771960
aaaacattgaatc

SEQ ID NO: 192114 - DNA, 13 bp, Unknown
  misc_feature (1)..( 13): Result.006 file - promoters50/4771960
atatcattaacat

SEQ ID NO: 192115 - DNA, 13 bp, Unknown
  misc_feature (1)..( 13): Result.006 file - promoters50/4771960
aaaatattatata

SEQ ID NO: 192116 - DNA, 13 bp, Unknown
  misc_feature (1)..( 13): Result.006 file - promoters50/4771968
atgaaattaactt

SEQ ID NO: 192117 - DNA, 10 bp, Unknown
  misc_feature (1)..( 10): Result.006 file - promoters50/4771968
catatcatac

SEQ ID NO: 192118 - DNA, 10 bp, Unknown
  misc_feature (1)..( 10): Result.006 file - promoters50/4771968
tttataatat

SEQ ID NO: 192119 - DNA, 10 bp, Unknown
  misc_feature (1)..( 10): Result.006 file - promoters50/4771968
catttcacta

SEQ ID NO: 192120 - DNA, 10 bp, Unknown
  misc_feature (1)..( 10): Result.006 file - promoters50/4771968
gctaagatat

SEQ ID NO: 192121 - DNA, 10 bp, Unknown
  misc_feature (1)..( 10): Result.006 file - promoters50/4771968
attaaaatat

SEQ ID NO: 192122 - DNA, 10 bp, Unknown
  misc_feature (1)..( 10): Result.006 file - promoters50/4771968
ttttttttaa

SEQ ID NO: 192123 - DNA, 12 bp, Unknown
  misc_feature (1)..( 12): Result.006 file - promoters50/4771968
ttcaaaaatcca

SEQ ID NO: 192124 - DNA, 12 bp, Unknown
  misc_feature (1)..( 12): Result.006 file - promoters50/4771968
atataaactccc

SEQ ID NO: 192125 - DNA, 13 bp, Unknown
  misc_feature (1)..( 13): Result.006 file - promoters50/4771968
ttataaagatcct

SEQ ID NO: 192126 - DNA, 13 bp, Unknown
  misc_feature (1)..( 13): Result.006 file - promoters50/4771968
tatatatactctc

SEQ ID NO: 192127 - DNA, 13 bp, Unknown
  misc_feature (1)..( 13): Result.006 file - promoters50/4771968
gaataataatgat

SEQ ID NO: 192128 - DNA, 13 bp, Unknown
  misc_feature (1)..( 13): Result.006 file - promoters50/4771972
tatatataaagac

SEQ ID NO: 192129 - DNA, 9 bp, Unknown
  misc_feature (1)..( 9): Result.006 file - promoters50/4771972
ctaactaaa

SEQ ID NO: 192130 - DNA, 9 bp, Unknown
  misc_feature (1)..( 9): Result.006 file - promoters50/4771972
gaaacaaaa

SEQ ID NO: 192131 - DNA, 9 bp, Unknown
  misc_feature (1)..( 9): Result.006 file - promoters50/4771972
gaaagaaag

SEQ ID NO: 192132 - DNA, 8 bp, Unknown
  misc_feature (1)..( 8): Result.006 file - promoters50/4771972
ttttgttt

SEQ ID NO: 192133 - DNA, 8 bp, Unknown
  misc_feature (1)..( 8): Result.006 file - promoters50/4771972
atttgtta

SEQ ID NO: 192134 - DNA, 8 bp, Unknown
  misc_feature (1)..( 8): Result.006 file - promoters50/4771972
ttttcttt

SEQ ID NO: 192135 - DNA, 7 bp, Unknown
  misc_feature (1)..( 7): Result.006 file - promoters50/4771972
taaaaat

SEQ ID NO: 192136 - DNA, 7 bp, Unknown
  misc_feature (1)..( 7): Result.006 file - promoters50/4771972
taataat

SEQ ID NO: 192137 - DNA, 7 bp, Unknown
  misc_feature (1)..( 7): Result.006 file - promoters50/4771972
taaaaag

SEQ ID NO: 192138 - DNA, 10 bp, Unknown
  misc_feature (1)..( 10): Result.006 file - promoters50/4771972
taaaataaca

SEQ ID NO: 192139 - DNA, 10 bp, Unknown
  misc_feature (1)..( 10): Result.006 file - promoters50/4771972
taaagtaaag

SEQ ID NO: 192140 - DNA, 10 bp, Unknown
  misc_feature (1)..( 10): Result.006 file - promoters50/4771975
aaaagaaaag

SEQ ID NO: 192141 - DNA, 10 bp, Unknown
  misc_feature (1)..( 10): Result.006 file - promoters50/4771975
tgttagtaat

SEQ ID NO: 192142 - DNA, 10 bp, Unknown
  misc_feature (1)..( 10): Result.006 file - promoters50/4771975
acttaataac

SEQ ID NO: 192143 - DNA, 11 bp, Unknown
  misc_feature (1)..( 11): Result.006 file - promoters50/4771990
atttaattaat

SEQ ID NO: 192144 - DNA, 8 bp, Unknown
  misc_feature (1)..( 8): Result.006 file - promoters50/4771990
aattaaat

SEQ ID NO: 192145 - DNA, 8 bp, Unknown
  misc_feature (1)..( 8): Result.006 file - promoters50/4771990
aatgaaat

SEQ ID NO: 192146 - DNA, 8 bp, Unknown
  misc_feature (1)..( 8): Result.006 file - promoters50/4772005
aataaaat

SEQ ID NO: 192147 - DNA, 14 bp, Unknown
  misc_feature (1)..( 14): Result.006 file - promoters50/4772005
gcttcttaaattga

SEQ ID NO: 192148 - DNA, 14 bp, Unknown
  misc_feature (1)..( 14): Result.006 file - promoters50/4772005
tgtatttaagttga

SEQ ID NO: 192149 - DNA, 14 bp, Unknown
  misc_feature (1)..( 14): Result.006 file - promoters50/4772005
tctttttaaaaaag

SEQ ID NO: 192150 - DNA, 14 bp, Unknown
  misc_feature (1)..( 14): Result.006 file - promoters50/4772005
tcttttcccaatta

SEQ ID NO: 192151 - DNA, 14 bp, Unknown
  misc_feature (1)..( 14): Result.006 file - promoters50/4772005
tcgttttaaaaatc

SEQ ID NO: 192152 - DNA, 11 bp, Unknown
  misc_feature (1)..( 11): Result.006 file - promoters50/4772005
ataacatattt

SEQ ID NO: 192153 - DNA, 11 bp, Unknown
  misc_feature (1)..( 11): Result.006 file - promoters50/4772005
gaaacaaattt

SEQ ID NO: 192154 - DNA, 11 bp, Unknown
  misc_feature (1)..( 11): Result.006 file - promoters50/4772005
ttaatatacgt

SEQ ID NO: 192155 - DNA, 11 bp, Unknown
  misc_feature (1)..( 11): Result.006 file - promoters50/4772005
aaaataaaaaa

SEQ ID NO: 192156 - DNA, 11 bp, Unknown
  misc_feature (1)..( 11): Result.006 file - promoters50/4772005
ttaatatccaa

SEQ ID NO: 192157 - DNA, 12 bp, Unknown
  misc_feature (1)..( 12): Result.006 file - promoters50/4772005
tttgaaatattt

SEQ ID NO: 192158 - DNA, 12 bp, Unknown
  misc_feature (1)..( 12): Result.006 file - promoters50/4772005
ctttcaatattg

SEQ ID NO: 192159 - DNA, 11 bp, Unknown
  misc_feature (1)..( 11): Result.006 file - promoters50/4772005
ttttaatatat

SEQ ID NO: 192160 - DNA, 12 bp, Unknown
  misc_feature (1)..( 12): Result.006 file - promoters50/4772005
ttttatatattt

SEQ ID NO: 192161 - DNA, 12 bp, Unknown
  misc_feature (1)..( 12): Result.006 file - promoters50/4772042
cttgcaatgtta

SEQ ID NO: 192162 - DNA, 8 bp, Unknown
  misc_feature (1)..( 8): Result.006 file - promoters50/4772042
taaaaaca

SEQ ID NO: 192163 - DNA, 8 bp, Unknown
  misc_feature (1)..( 8): Result.006 file - promoters50/4772042
gcaaaaca

SEQ ID NO: 192164 - DNA, 8 bp, Unknown
  misc_feature (1)..( 8): Result.006 file - promoters50/4772042
taaaaacc

SEQ ID NO: 192165 - DNA, 8 bp, Unknown
  misc_feature (1)..( 8): Result.006 file - promoters50/4772042
ttatcttt

SEQ ID NO: 192166 - DNA, 8 bp, Unknown
  misc_feature (1)..( 8): Result.006 file - promoters50/4772042
ttattttt

SEQ ID NO: 192167 - DNA, 8 bp, Unknown
  misc_feature (1)..( 8): Result.006 file - promoters50/4772050
gtatctta

SEQ ID NO: 192168 - DNA, 10 bp, Unknown
  misc_feature (1)..( 10): Result.006 file - promoters50/4772050
tccaacattc

SEQ ID NO: 192169 - DNA, 10 bp, Unknown
  misc_feature (1)..( 10): Result.006 file - promoters50/4772050
aacaacatgt

SEQ ID NO: 192170 - DNA, 10 bp, Unknown
  misc_feature (1)..( 10): Result.006 file - promoters50/4772062
aacaacttgt

SEQ ID NO: 192171 - DNA, 10 bp, Unknown
  misc_feature (1)..( 10): Result.006 file - promoters50/4772062
cacaactaat

SEQ ID NO: 192172 - DNA, 10 bp, Unknown
  misc_feature (1)..( 10): Result.006 file - promoters50/4772062
aacaattaaa

SEQ ID NO: 192173 - DNA, 10 bp, Unknown
  misc_feature (1)..( 10): Result.006 file - promoters50/4772062
atcaattaat

SEQ ID NO: 192174 - DNA, 10 bp, Unknown
  misc_feature (1)..( 10): Result.006 file - promoters50/4772062
atttactaat

SEQ ID NO: 192175 - DNA, 10 bp, Unknown
  misc_feature (1)..( 10): Result.006 file - promoters50/4772062
caatactaat

SEQ ID NO: 192176 - DNA, 10 bp, Unknown
  misc_feature (1)..( 10): Result.006 file - promoters50/4772062
tataattaat

SEQ ID NO: 192177 - DNA, 10 bp, Unknown
  misc_feature (1)..( 10): Result.006 file - promoters50/4772062
gattattaaa

SEQ ID NO: 192178 - DNA, 10 bp, Unknown
  misc_feature (1)..( 10): Result.006 file - promoters50/4772062
tatgattata

SEQ ID NO: 192179 - DNA, 9 bp, Unknown
  misc_feature (1)..( 9): Result.006 file - promoters50/4772062
tagttggta

SEQ ID NO: 192180 - DNA, 9 bp, Unknown
  misc_feature (1)..( 9): Result.006 file - promoters50/4772062
gatttggta

SEQ ID NO: 192181 - DNA, 9 bp, Unknown
  misc_feature (1)..( 9): Result.006 file - promoters50/4772062
tagtcggtc

SEQ ID NO: 192182 - DNA, 9 bp, Unknown
  misc_feature (1)..( 9): Result.006 file - promoters50/4772062
tttttggtc

SEQ ID NO: 192183 - DNA, 9 bp, Unknown
  misc_feature (1)..( 9): Result.006 file - promoters50/4772062
tctttggtt

SEQ ID NO: 192184 - DNA, 9 bp, Unknown
  misc_feature (1)..( 9): Result.006 file - promoters50/4772062
actttggat

SEQ ID NO: 192185 - DNA, 13 bp, Unknown
  misc_feature (1)..( 13): Result.006 file - promoters50/4772062
ataaccaaaatca

SEQ ID NO: 192186 - DNA, 13 bp, Unknown
  misc_feature (1)..( 13): Result.006 file - promoters50/4772062
tgaacaaaaacag

SEQ ID NO: 192187 - DNA, 13 bp, Unknown
  misc_feature (1)..( 13): Result.006 file - promoters50/4772062
cttaccaaatgat

SEQ ID NO: 192188 - DNA, 13 bp, Unknown
  misc_feature (1)..( 13): Result.006 file - promoters50/4772062
ggtacaaaaatta

SEQ ID NO: 192189 - DNA, 13 bp, Unknown
  misc_feature (1)..( 13): Result.006 file - promoters50/4772062
agaacaatagagg

SEQ ID NO: 192190 - DNA, 13 bp, Unknown
  misc_feature (1)..( 13): Result.006 file - promoters50/4772062
agaacatggctta

SEQ ID NO: 192191 - DNA, 13 bp, Unknown
  misc_feature (1)..( 13): Result.006 file - promoters50/4772062
tttaaaaaaatta

SEQ ID NO: 192192 - DNA, 9 bp, Unknown
  misc_feature (1)..( 9): Result.006 file - promoters50/4772062
agaaaaaga

SEQ ID NO: 192193 - DNA, 9 bp, Unknown
  misc_feature (1)..( 9): Result.006 file - promoters50/4772062
agaaaaaga

SEQ ID NO: 192194 - DNA, 9 bp, Unknown
  misc_feature (1)..( 9): Result.006 file - promoters50/4772062
gaaaaaaga

SEQ ID NO: 192195 - DNA, 9 bp, Unknown
  misc_feature (1)..( 9): Result.006 file - promoters50/4772062
aaacaaaga

SEQ ID NO: 192196 - DNA, 9 bp, Unknown
  misc_feature (1)..( 9): Result.006 file - promoters50/4772062
agaaaaaag

SEQ ID NO: 192197 - DNA, 9 bp, Unknown
  misc_feature (1)..( 9): Result.006 file - promoters50/4772062
taaaaaaaa

SEQ ID NO: 192198 - DNA, 9 bp, Unknown
  misc_feature (1)..( 9): Result.006 file - promoters50/4772062
caaaaaagt

SEQ ID NO: 192199 - DNA, 22 bp, Unknown
  misc_feature (1)..( 22): Result.006 file - promoters50/4772062
ttataaaaactaatgatgctaa

SEQ ID NO: 192200 - DNA, 22 bp, Unknown
  misc_feature (1)..( 22): Result.006 file - promoters50/4772062
acaagaaaactaggaaaaaaaa

SEQ ID NO: 192201 - DNA, 22 bp, Unknown
  misc_feature (1)..( 22): Result.006 file - promoters50/4772062
ttaaaaaaattaaggatggtaa

SEQ ID NO: 192202 - DNA, 22 bp, Unknown
  misc_feature (1)..( 22): Result.006 file - promoters50/4772062
gaagaaatattgataatatatg

SEQ ID NO: 192203 - DNA, 22 bp, Unknown
  misc_feature (1)..( 22): Result.006 file - promoters50/4772062
tttcaaatcattaacatggtac

SEQ ID NO: 192204 - DNA, 22 bp, Unknown
  misc_feature (1)..( 22): Result.006 file - promoters50/4772062
tcatgcatgctaatatttactg

SEQ ID NO: 192205 - DNA, 22 bp, Unknown
  misc_feature (1)..( 22): Result.006 file - promoters50/4772062
ttttgttaattataaaaactaa

SEQ ID NO: 192206 - DNA, 22 bp, Unknown
  misc_feature (1)..( 22): Result.006 file - promoters50/4772062
tctaacaaataatatgctcatg

SEQ ID NO: 192207 - DNA, 22 bp, Unknown
  misc_feature (1)..( 22): Result.006 file - promoters50/4772062
ttaaaaaaattaaggatggtaa

SEQ ID NO: 192208 - DNA, 22 bp, Unknown
  misc_feature (1)..( 22): Result.006 file - promoters50/4772062
aaagaagaaatattgataatat

SEQ ID NO: 192209 - DNA, 22 bp, Unknown
  misc_feature (1)..( 22): Result.006 file - promoters50/4772062
tggattgtttttcaaatcatta

SEQ ID NO: 192210 - DNA, 22 bp, Unknown
  misc_feature (1)..( 22): Result.006 file - promoters50/4772062
ttcaaaaaaaaatgtcaatttt

SEQ ID NO: 192211 - DNA, 11 bp, Unknown
  misc_feature (1)..( 11): Result.006 file - promoters50/4772062
tgaaaaagcaa

SEQ ID NO: 192212 - DNA, 11 bp, Unknown
  misc_feature (1)..( 11): Result.006 file - promoters50/4772062
tttaaaatcaa

SEQ ID NO: 192213 - DNA, 11 bp, Unknown
  misc_feature (1)..( 11): Result.006 file - promoters50/4772062
aagaaaaatta

SEQ ID NO: 192214 - DNA, 11 bp, Unknown
  misc_feature (1)..( 11): Result.006 file - promoters50/4772062
aagaaaaatta

SEQ ID NO: 192215 - DNA, 11 bp, Unknown
  misc_feature (1)..( 11): Result.006 file - promoters50/4772062
aagcaaaatta

SEQ ID NO: 192216 - DNA, 11 bp, Unknown
  misc_feature (1)..( 11): Result.006 file - promoters50/4772066
attataatttt

SEQ ID NO: 192217 - DNA, 7 bp, Unknown
  misc_feature (1)..( 7): Result.006 file - promoters50/4772066
agatcaa

SEQ ID NO: 192218 - DNA, 12 bp, Unknown
  misc_feature (1)..( 12): Result.006 file - promoters50/4772066
actatagatcaa

SEQ ID NO: 192219 - DNA, 12 bp, Unknown
  misc_feature (1)..( 12): Result.006 file - promoters50/4772066
actatagatctt

SEQ ID NO: 192220 - DNA, 9 bp, Unknown
  misc_feature (1)..( 9): Result.006 file - promoters50/4772066
ttggatgat

SEQ ID NO: 192221 - DNA, 9 bp, Unknown
  misc_feature (1)..( 9): Result.006 file - promoters50/4772066
ttgaatggt

SEQ ID NO: 192222 - DNA, 9 bp, Unknown
  misc_feature (1)..( 9): Result.006 file - promoters50/4772070
ctggaagat

SEQ ID NO: 192223 - DNA, 9 bp, Unknown
  misc_feature (1)..( 9): Result.006 file - promoters50/4772070
agatggtac

SEQ ID NO: 192224 - DNA, 9 bp, Unknown
  misc_feature (1)..( 9): Result.006 file - promoters50/4772070
ttatggtat

SEQ ID NO: 192225 - DNA, 9 bp, Unknown
  misc_feature (1)..( 9): Result.006 file - promoters50/4772070
tgatgatac

SEQ ID NO: 192226 - DNA, 9 bp, Unknown
  misc_feature (1)..( 9): Result.006 file - promoters50/4772070
taatggtaa

SEQ ID NO: 192227 - DNA, 9 bp, Unknown
  misc_feature (1)..( 9): Result.006 file - promoters50/4772070
tgatgaatc

SEQ ID NO: 192228 - DNA, 9 bp, Unknown
  misc_feature (1)..( 9): Result.006 file - promoters50/4772084
gcttggtaa

SEQ ID NO: 192229 - DNA, 11 bp, Unknown
  misc_feature (1)..( 11): Result.006 file - promoters50/4772084
tgaacttatga

SEQ ID NO: 192230 - DNA, 9 bp, Unknown
  misc_feature (1)..( 9): Result.006 file - promoters50/4772084
aacttagca

SEQ ID NO: 192231 - DNA, 11 bp, Unknown
  misc_feature (1)..( 11): Result.006 file - promoters50/4772084
tgaatttataa

SEQ ID NO: 192232 - DNA, 11 bp, Unknown
  misc_feature (1)..( 11): Result.006 file - promoters50/4772084
tacttttttaa

SEQ ID NO: 192233 - DNA, 8 bp, Unknown
  misc_feature (1)..( 8): Result.006 file - promoters50/4772084
tctttttt

SEQ ID NO: 192234 - DNA, 11 bp, Unknown
  misc_feature (1)..( 11): Result.006 file - promoters50/4772084
tttctgtttta

SEQ ID NO: 192235 - DNA, 10 bp, Unknown
  misc_feature (1)..( 10): Result.006 file - promoters50/4772084
ctaaatgata

SEQ ID NO: 192236 - DNA, 10 bp, Unknown
  misc_feature (1)..( 10): Result.006 file - promoters50/4772084
aaaaaagatt

SEQ ID NO: 192237 - DNA, 10 bp, Unknown
  misc_feature (1)..( 10): Result.006 file - promoters50/4772084
ataaatgggc

SEQ ID NO: 192238 - DNA, 10 bp, Unknown
  misc_feature (1)..( 10): Result.006 file - promoters50/4772084
aaaaataata

SEQ ID NO: 192239 - DNA, 10 bp, Unknown
  misc_feature (1)..( 10): Result.006 file - promoters50/4772084
cgaaatggac

SEQ ID NO: 192240 - DNA, 10 bp, Unknown
  misc_feature (1)..( 10): Result.006 file - promoters50/4772084
aaaaaaaatt

SEQ ID NO: 192241 - DNA, 17 bp, Unknown
  misc_feature (1)..( 17): Result.006 file - promoters50/4772084
aattcaacaatagaggt

SEQ ID NO: 192242 - DNA, 17 bp, Unknown
  misc_feature (1)..( 17): Result.006 file - promoters50/4772084
ttgaaaacaatttatat

SEQ ID NO: 192243 - DNA, 17 bp, Unknown
  misc_feature (1)..( 17): Result.006 file - promoters50/4772084
ttttaaaaaatgttatc

SEQ ID NO: 192244 - DNA, 17 bp, Unknown
  misc_feature (1)..( 17): Result.006 file - promoters50/4772084
atagaaagaataataat

SEQ ID NO: 192245 - DNA, 17 bp, Unknown
  misc_feature (1)..( 17): Result.006 file - promoters50/4772084
gtttcaacaacttatat

SEQ ID NO: 192246 - DNA, 17 bp, Unknown
  misc_feature (1)..( 17): Result.006 file - promoters50/4772084
ttataaacttttttttg

SEQ ID NO: 192247 - DNA, 12 bp, Unknown
  misc_feature (1)..( 12): Result.006 file - promoters50/4772084
tcaatttaattt

SEQ ID NO: 192248 - DNA, 12 bp, Unknown
  misc_feature (1)..( 12): Result.006 file - promoters50/4772084
tatttttagttt

SEQ ID NO: 192249 - DNA, 12 bp, Unknown
  misc_feature (1)..( 12): Result.006 file - promoters50/4772084
ataatttaactt

SEQ ID NO: 192250 - DNA, 12 bp, Unknown
  misc_feature (1)..( 12): Result.006 file - promoters50/4772084
gaaccttatttt

SEQ ID NO: 192251 - DNA, 12 bp, Unknown
  misc_feature (1)..( 12): Result.006 file - promoters50/4772084
acaatttatatt

SEQ ID NO: 192252 - DNA, 12 bp, Unknown
  misc_feature (1)..( 12): Result.006 file - promoters50/4772084
tatttttagtta

SEQ ID NO: 192253 - DNA, 9 bp, Unknown
  misc_feature (1)..( 9): Result.006 file - promoters50/4772084
ggtactttc

SEQ ID NO: 192254 - DNA, 9 bp, Unknown
  misc_feature (1)..( 9): Result.006 file - promoters50/4772084
ggtacttga

SEQ ID NO: 192255 - DNA, 9 bp, Unknown
  misc_feature (1)..( 9): Result.006 file - promoters50/4772084
gatactttt

SEQ ID NO: 192256 - DNA, 9 bp, Unknown
  misc_feature (1)..( 9): Result.006 file - promoters50/4772084
gatattttt

SEQ ID NO: 192257 - DNA, 9 bp, Unknown
  misc_feature (1)..( 9): Result.006 file - promoters50/4772084
gttattttt

SEQ ID NO: 192258 - DNA, 9 bp, Unknown
  misc_feature (1)..( 9): Result.006 file - promoters50/4772084
actattttt

SEQ ID NO: 192259 - DNA, 9 bp, Unknown
  misc_feature (1)..( 9): Result.006 file - promoters50/4772084
gaattcaaa

SEQ ID NO: 192260 - DNA, 9 bp, Unknown
  misc_feature (1)..( 9): Result.006 file - promoters50/4772084
aaatacaaa

SEQ ID NO: 192261 - DNA, 9 bp, Unknown
  misc_feature (1)..( 9): Result.006 file - promoters50/4772084
tcataaaaa

SEQ ID NO: 192262 - DNA, 9 bp, Unknown
  misc_feature (1)..( 9): Result.006 file - promoters50/4772084
tcataaatg

SEQ ID NO: 192263 - DNA, 9 bp, Unknown
  misc_feature (1)..( 9): Result.006 file - promoters50/4772084
ttataaaac

SEQ ID NO: 192264 - DNA, 9 bp, Unknown
  misc_feature (1)..( 9): Result.006 file - promoters50/4772095
ttagaaaaa

SEQ ID NO: 192265 - DNA, 14 bp, Unknown
  misc_feature (1)..( 14): Result.006 file - promoters50/4772095
aaaaaaacaattat

SEQ ID NO: 192266 - DNA, 14 bp, Unknown
  misc_feature (1)..( 14): Result.006 file - promoters50/4772095
tagtcttcaaatat

SEQ ID NO: 192267 - DNA, 14 bp, Unknown
  misc_feature (1)..( 14): Result.006 file - promoters50/4772095
tatggttcaaatct

SEQ ID NO: 192268 - DNA, 14 bp, Unknown
  misc_feature (1)..( 14): Result.006 file - promoters50/4772095
tatgtttccaatat

SEQ ID NO: 192269 - DNA, 14 bp, Unknown
  misc_feature (1)..( 14): Result.006 file - promoters50/4772103
gatttttcaatttt

SEQ ID NO: 192270 - DNA, 17 bp, Unknown
  misc_feature (1)..( 17): Result.006 file - promoters50/4772103
aaaaacaaaaaagttaa

SEQ ID NO: 192271 - DNA, 17 bp, Unknown
  misc_feature (1)..( 17): Result.006 file - promoters50/4772103
aaaaagaaaaaagttaa

SEQ ID NO: 192272 - DNA, 17 bp, Unknown
  misc_feature (1)..( 17): Result.006 file - promoters50/4772103
agaaccaaaagaatcta

SEQ ID NO: 192273 - DNA, 17 bp, Unknown
  misc_feature (1)..( 17): Result.006 file - promoters50/4772115
agcaacagatgatgact

SEQ ID NO: 192274 - DNA, 10 bp, Unknown
  misc_feature (1)..( 10): Result.006 file - promoters50/4772115
aaacccactc

SEQ ID NO: 192275 - DNA, 10 bp, Unknown
  misc_feature (1)..( 10): Result.006 file - promoters50/4772115
aaacctactc

SEQ ID NO: 192276 - DNA, 10 bp, Unknown
  misc_feature (1)..( 10): Result.006 file - promoters50/4772115
aaaccctact

SEQ ID NO: 192277 - DNA, 7 bp, Unknown
  misc_feature (1)..( 7): Result.006 file - promoters50/4772115
atagttt

SEQ ID NO: 192278 - DNA, 7 bp, Unknown
  misc_feature (1)..( 7): Result.006 file - promoters50/4772115
ataattt

SEQ ID NO: 192279 - DNA, 7 bp, Unknown
  misc_feature (1)..( 7): Result.006 file - promoters50/4772122
ttaattt

SEQ ID NO: 192280 - DNA, 9 bp, Unknown
  misc_feature (1)..( 9): Result.006 file - promoters50/4772122
aaataaaat

SEQ ID NO: 192281 - DNA, 9 bp, Unknown
  misc_feature (1)..( 9): Result.006 file - promoters50/4772122
ggataaaac

SEQ ID NO: 192282 - DNA, 9 bp, Unknown
  misc_feature (1)..( 9): Result.006 file - promoters50/4772122
ggacaaaat

SEQ ID NO: 192283 - DNA, 9 bp, Unknown
  misc_feature (1)..( 9): Result.006 file - promoters50/4772130
gcacataat

SEQ ID NO: 192284 - DNA, 10 bp, Unknown
  misc_feature (1)..( 10): Result.006 file - promoters50/4772130
gaataaattc

SEQ ID NO: 192285 - DNA, 10 bp, Unknown
  misc_feature (1)..( 10): Result.006 file - promoters50/4772130
ccttaacttc

SEQ ID NO: 192286 - DNA, 10 bp, Unknown
  misc_feature (1)..( 10): Result.006 file - promoters50/4772130
acataaataa

SEQ ID NO: 192287 - DNA, 10 bp, Unknown
  misc_feature (1)..( 10): Result.006 file - promoters50/4772130
gcataaattt

SEQ ID NO: 192288 - DNA, 10 bp, Unknown
  misc_feature (1)..( 10): Result.006 file - promoters50/4772130
attaaaattg

SEQ ID NO: 192289 - DNA, 10 bp, Unknown
  misc_feature (1)..( 10): Result.006 file - promoters50/4772130
gcatcaatcg

SEQ ID NO: 192290 - DNA, 10 bp, Unknown
  misc_feature (1)..( 10): Result.006 file - promoters50/4772130
gcatcaacaa

SEQ ID NO: 192291 - DNA, 14 bp, Unknown
  misc_feature (1)..( 14): Result.006 file - promoters50/4772130
atattaaaattgaa

SEQ ID NO: 192292 - DNA, 14 bp, Unknown
  misc_feature (1)..( 14): Result.006 file - promoters50/4772130
aaataaaaatttgt

SEQ ID NO: 192293 - DNA, 14 bp, Unknown
  misc_feature (1)..( 14): Result.006 file - promoters50/4772130
tagcataaatttga

SEQ ID NO: 192294 - DNA, 14 bp, Unknown
  misc_feature (1)..( 14): Result.006 file - promoters50/4772130
acattaaaattgtc

SEQ ID NO: 192295 - DNA, 14 bp, Unknown
  misc_feature (1)..( 14): Result.006 file - promoters50/4772130
gcatcaatcgtgaa

SEQ ID NO: 192296 - DNA, 14 bp, Unknown
  misc_feature (1)..( 14): Result.006 file - promoters50/4772133
gcatcaacaacgcc

SEQ ID NO: 192297 - DNA, 7 bp, Unknown
  misc_feature (1)..( 7): Result.006 file - promoters50/4772133
aagaatg

SEQ ID NO: 192298 - DNA, 7 bp, Unknown
  misc_feature (1)..( 7): Result.006 file - promoters50/4772133
gagaatg

SEQ ID NO: 192299 - DNA, 7 bp, Unknown
  misc_feature (1)..( 7): Result.006 file - promoters50/4772137
aagaatt

SEQ ID NO: 192300 - DNA, 17 bp, Unknown
  misc_feature (1)..( 17): Result.006 file - promoters50/4772137
tatgatctgattttaag

SEQ ID NO: 192301 - DNA, 17 bp, Unknown
  misc_feature (1)..( 17): Result.006 file - promoters50/4772137
ccatgtgagatcttagt

SEQ ID NO: 192302 - DNA, 17 bp, Unknown
  misc_feature (1)..( 17): Result.006 file - promoters50/4772137
gttctttctattgtaag

SEQ ID NO: 192303 - DNA, 17 bp, Unknown
  misc_feature (1)..( 17): Result.006 file - promoters50/4772137
tctggagagattttgat

SEQ ID NO: 192304 - DNA, 17 bp, Unknown
  misc_feature (1)..( 17): Result.006 file - promoters50/4772137
tctggagagattttgat

SEQ ID NO: 192305 - DNA, 17 bp, Unknown
  misc_feature (1)..( 17): Result.006 file - promoters50/4772137
ttggcaaaaattgtgat

SEQ ID NO: 192306 - DNA, 10 bp, Unknown
  misc_feature (1)..( 10): Result.006 file - promoters50/4772137
gaagtttagt

SEQ ID NO: 192307 - DNA, 10 bp, Unknown
  misc_feature (1)..( 10): Result.006 file - promoters50/4772137
gaaatttata

SEQ ID NO: 192308 - DNA, 10 bp, Unknown
  misc_feature (1)..( 10): Result.006 file - promoters50/4772137
aatatttata

SEQ ID NO: 192309 - DNA, 10 bp, Unknown
  misc_feature (1)..( 10): Result.006 file - promoters50/4772137
gaaattgtcg

SEQ ID NO: 192310 - DNA, 10 bp, Unknown
  misc_feature (1)..( 10): Result.006 file - promoters50/4772137
gaacttggca

SEQ ID NO: 192311 - DNA, 10 bp, Unknown
  misc_feature (1)..( 10): Result.006 file - promoters50/4772137
atgatttatt

SEQ ID NO: 192312 - DNA, 15 bp, Unknown
  misc_feature (1)..( 15): Result.006 file - promoters50/4772137
ctttttttttttggt

SEQ ID NO: 192313 - DNA, 15 bp, Unknown
  misc_feature (1)..( 15): Result.006 file - promoters50/4772137
ctttctttttttggt

SEQ ID NO: 192314 - DNA, 15 bp, Unknown
  misc_feature (1)..( 15): Result.006 file - promoters50/4772137
atttatttgttaaac

SEQ ID NO: 192315 - DNA, 15 bp, Unknown
  misc_feature (1)..( 15): Result.006 file - promoters50/4772137
gtttttttaatacga

SEQ ID NO: 192316 - DNA, 15 bp, Unknown
  misc_feature (1)..( 15): Result.006 file - promoters50/4772137
tggtcttttgcaatt

SEQ ID NO: 192317 - DNA, 15 bp, Unknown
  misc_feature (1)..( 15): Result.006 file - promoters50/4772137
gcttctttttggtta

SEQ ID NO: 192318 - DNA, 15 bp, Unknown
  misc_feature (1)..( 15): Result.006 file - promoters50/4772155
ctttctttttttggt

SEQ ID NO: 192319 - DNA, 11 bp, Unknown
  misc_feature (1)..( 11): Result.006 file - promoters50/4772155
caataaaatcc

SEQ ID NO: 192320 - DNA, 11 bp, Unknown
  misc_feature (1)..( 11): Result.006 file - promoters50/4772155
caaaaaaaaaa

SEQ ID NO: 192321 - DNA, 11 bp, Unknown
  misc_feature (1)..( 11): Result.006 file - promoters50/4772155
ttctaaaatct

SEQ ID NO: 192322 - DNA, 11 bp, Unknown
  misc_feature (1)..( 11): Result.006 file - promoters50/4772155
caagaaagaaa

SEQ ID NO: 192323 - DNA, 8 bp, Unknown
  misc_feature (1)..( 8): Result.006 file - promoters50/4772155
attttttt

SEQ ID NO: 192324 - DNA, 8 bp, Unknown
  misc_feature (1)..( 8): Result.006 file - promoters50/4772155
attttttc

SEQ ID NO: 192325 - DNA, 8 bp, Unknown
  misc_feature (1)..( 8): Result.006 file - promoters50/4772155
atttgtta

SEQ ID NO: 192326 - DNA, 10 bp, Unknown
  misc_feature (1)..( 10): Result.006 file - promoters50/4772155
tatcttaacc

SEQ ID NO: 192327 - DNA, 10 bp, Unknown
  misc_feature (1)..( 10): Result.006 file - promoters50/4772155
gatcataaca

SEQ ID NO: 192328 - DNA, 10 bp, Unknown
  misc_feature (1)..( 10): Result.006 file - promoters50/4772155
gatcacaaca

SEQ ID NO: 192329 - DNA, 8 bp, Unknown
  misc_feature (1)..( 8): Result.006 file - promoters50/4772155
tctttaga

SEQ ID NO: 192330 - DNA, 8 bp, Unknown
  misc_feature (1)..( 8): Result.006 file - promoters50/4772155
tctataga

SEQ ID NO: 192331 - DNA, 8 bp, Unknown
  misc_feature (1)..( 8): Result.006 file - promoters50/4772155
acttaaga

SEQ ID NO: 192332 - DNA, 8 bp, Unknown
  misc_feature (1)..( 8): Result.006 file - promoters50/4772155
tttgttta

SEQ ID NO: 192333 - DNA, 8 bp, Unknown
  misc_feature (1)..( 8): Result.006 file - promoters50/4772155
ttttttta

SEQ ID NO: 192334 - DNA, 8 bp, Unknown
  misc_feature (1)..( 8): Result.006 file - promoters50/4772167
attgatta

SEQ ID NO: 192335 - DNA, 7 bp, Unknown
  misc_feature (1)..( 7): Result.006 file - promoters50/4772167
gaagaaa

SEQ ID NO: 192336 - DNA, 7 bp, Unknown
  misc_feature (1)..( 7): Result.006 file - promoters50/4772167
aaagaaa

SEQ ID NO: 192337 - DNA, 7 bp, Unknown
  misc_feature (1)..( 7): Result.006 file - promoters50/4772167
gaagaat

SEQ ID NO: 192338 - DNA, 8 bp, Unknown
  misc_feature (1)..( 8): Result.006 file - promoters50/4772167
aaacgaac

SEQ ID NO: 192339 - DNA, 8 bp, Unknown
  misc_feature (1)..( 8): Result.006 file - promoters50/4772167
aaacaaac

SEQ ID NO: 192340 - DNA, 8 bp, Unknown
  misc_feature (1)..( 8): Result.006 file - promoters50/4772167
taaccaac

SEQ ID NO: 192341 - DNA, 6 bp, Unknown
  misc_feature (1)..( 6): Result.006 file - promoters50/4772167
aaaccc

SEQ ID NO: 192342 - DNA, 6 bp, Unknown
  misc_feature (1)..( 6): Result.006 file - promoters50/4772167
aaaccc

SEQ ID NO: 192343 - DNA, 7 bp, Unknown
  misc_feature (1)..( 7): Result.006 file - promoters50/4772167
aaagccc

SEQ ID NO: 192344 - DNA, 9 bp, Unknown
  misc_feature (1)..( 9): Result.006 file - promoters50/4772167
gagaatata

SEQ ID NO: 192345 - DNA, 9 bp, Unknown
  misc_feature (1)..( 9): Result.006 file - promoters50/4772167
gagaatctt

SEQ ID NO: 192346 - DNA, 9 bp, Unknown
  misc_feature (1)..( 9): Result.006 file - promoters50/4772167
cagattctt

SEQ ID NO: 192347 - DNA, 8 bp, Unknown
  misc_feature (1)..( 8): Result.006 file - promoters50/4772167
tgaatcag

SEQ ID NO: 192348 - DNA, 8 bp, Unknown
  misc_feature (1)..( 8): Result.006 file - promoters50/4772167
tgaatcaa

SEQ ID NO: 192349 - DNA, 8 bp, Unknown
  misc_feature (1)..( 8): Result.006 file - promoters50/4772167
ttaatcaa

SEQ ID NO: 192350 - DNA, 9 bp, Unknown
  misc_feature (1)..( 9): Result.006 file - promoters50/4772167
tttgaattt

SEQ ID NO: 192351 - DNA, 9 bp, Unknown
  misc_feature (1)..( 9): Result.006 file - promoters50/4772167
tttgaagaa

SEQ ID NO: 192352 - DNA, 9 bp, Unknown
  misc_feature (1)..( 9): Result.006 file - promoters50/4772167
tttaaattt

SEQ ID NO: 192353 - DNA, 10 bp, Unknown
  misc_feature (1)..( 10): Result.006 file - promoters50/4772167
atgattctac

SEQ ID NO: 192354 - DNA, 10 bp, Unknown
  misc_feature (1)..( 10): Result.006 file - promoters50/4772167
atgattttaa

SEQ ID NO: 192355 - DNA, 10 bp, Unknown
  misc_feature (1)..( 10): Result.006 file - promoters50/4772167
atgattttac

SEQ ID NO: 192356 - DNA, 8 bp, Unknown
  misc_feature (1)..( 8): Result.006 file - promoters50/4772167
taatgttt

SEQ ID NO: 192357 - DNA, 8 bp, Unknown
  misc_feature (1)..( 8): Result.006 file - promoters50/4772167
aaattttt

SEQ ID NO: 192358 - DNA, 8 bp, Unknown
  misc_feature (1)..( 8): Result.006 file - promoters50/4772171
aaatttga

SEQ ID NO: 192359 - DNA, 7 bp, Unknown
  misc_feature (1)..( 7): Result.006 file - promoters50/4772171
aaattta

SEQ ID NO: 192360 - DNA, 7 bp, Unknown
  misc_feature (1)..( 7): Result.006 file - promoters50/4772171
taattta

SEQ ID NO: 192361 - DNA, 7 bp, Unknown
  misc_feature (1)..( 7): Result.006 file - promoters50/4772171
taatttg

SEQ ID NO: 192362 - DNA, 9 bp, Unknown
  misc_feature (1)..( 9): Result.006 file - promoters50/4772171
ctatataaa

SEQ ID NO: 192363 - DNA, 9 bp, Unknown
  misc_feature (1)..( 9): Result.006 file - promoters50/4772171
atatatata

SEQ ID NO: 192364 - DNA, 9 bp, Unknown
  misc_feature (1)..( 9): Result.006 file - promoters50/4772171
ctatatata

SEQ ID NO: 192365 - DNA, 9 bp, Unknown
  misc_feature (1)..( 9): Result.006 file - promoters50/4772171
ttatttata

SEQ ID NO: 192366 - DNA, 7 bp, Unknown
  misc_feature (1)..( 7): Result.006 file - promoters50/4772171
attcaat

SEQ ID NO: 192367 - DNA, 7 bp, Unknown
  misc_feature (1)..( 7): Result.006 file - promoters50/4772171
attcaat

SEQ ID NO: 192368 - DNA, 7 bp, Unknown
  misc_feature (1)..( 7): Result.006 file - promoters50/4772171
attcaac

SEQ ID NO: 192369 - DNA, 11 bp, Unknown
  misc_feature (1)..( 11): Result.006 file - promoters50/4772171
tatagcaaata

SEQ ID NO: 192370 - DNA, 11 bp, Unknown
  misc_feature (1)..( 11): Result.006 file - promoters50/4772171
tatagcaaaac

SEQ ID NO: 192371 - DNA, 11 bp, Unknown
  misc_feature (1)..( 11): Result.006 file - promoters50/4772171
tgtagatgtag

SEQ ID NO: 192372 - DNA, 11 bp, Unknown
  misc_feature (1)..( 11): Result.006 file - promoters50/4772171
gctggcaaaaa

SEQ ID NO: 192373 - DNA, 7 bp, Unknown
  misc_feature (1)..( 7): Result.006 file - promoters50/4772171
gttttct

SEQ ID NO: 192374 - DNA, 7 bp, Unknown
  misc_feature (1)..( 7): Result.006 file - promoters50/4772171
cttttct

SEQ ID NO: 192375 - DNA, 7 bp, Unknown
  misc_feature (1)..( 7): Result.006 file - promoters50/4772195
cttatct

SEQ ID NO: 192376 - DNA, 13 bp, Unknown
  misc_feature (1)..( 13): Result.006 file - promoters50/4772195
ttcattttatttt

SEQ ID NO: 192377 - DNA, 13 bp, Unknown
  misc_feature (1)..( 13): Result.006 file - promoters50/4772195
ttctttttctttt

SEQ ID NO: 192378 - DNA, 13 bp, Unknown
  misc_feature (1)..( 13): Result.006 file - promoters50/4772195
attctttaattac

SEQ ID NO: 192379 - DNA, 13 bp, Unknown
  misc_feature (1)..( 13): Result.006 file - promoters50/4772195
aagattttcaatg

SEQ ID NO: 192380 - DNA, 13 bp, Unknown
  misc_feature (1)..( 13): Result.006 file - promoters50/4772195
ggaagttaatttc

SEQ ID NO: 192381 - DNA, 13 bp, Unknown
  misc_feature (1)..( 13): Result.006 file - promoters50/4772198
ttggtttaatcat

SEQ ID NO: 192382 - DNA, 9 bp, Unknown
  misc_feature (1)..( 9): Result.006 file - promoters50/4772198
aatttgttt

SEQ ID NO: 192383 - DNA, 9 bp, Unknown
  misc_feature (1)..( 9): Result.006 file - promoters50/4772198
catttgtat

SEQ ID NO: 192384 - DNA, 9 bp, Unknown
  misc_feature (1)..( 9): Result.006 file - promoters50/4772198
aatttgttt

SEQ ID NO: 192385 - DNA, 9 bp, Unknown
  misc_feature (1)..( 9): Result.006 file - promoters50/4772198
tatttttat

SEQ ID NO: 192386 - DNA, 7 bp, Unknown
  misc_feature (1)..( 7): Result.006 file - promoters50/4772198
caaaaag

SEQ ID NO: 192387 - DNA, 7 bp, Unknown
  misc_feature (1)..( 7): Result.006 file - promoters50/4772198
gaaaaag

SEQ ID NO: 192388 - DNA, 7 bp, Unknown
  misc_feature (1)..( 7): Result.006 file - promoters50/4772198
gaaaaat

SEQ ID NO: 192389 - DNA, 7 bp, Unknown
  misc_feature (1)..( 7): Result.006 file - promoters50/4772198
aaaaaat

SEQ ID NO: 192390 - DNA, 8 bp, Unknown
  misc_feature (1)..( 8): Result.006 file - promoters50/4772198
aaaaaaat

SEQ ID NO: 192391 - DNA, 8 bp, Unknown
  misc_feature (1)..( 8): Result.006 file - promoters50/4772198
aaaaaaaa

SEQ ID NO: 192392 - DNA, 9 bp, Unknown
  misc_feature (1)..( 9): Result.006 file - promoters50/4772198
aaacaaaaa

SEQ ID NO: 192393 - DNA, 9 bp, Unknown
  misc_feature (1)..( 9): Result.006 file - promoters50/4772208
taaaaaaat

SEQ ID NO: 192394 - DNA, 14 bp, Unknown
  misc_feature (1)..( 14): Result.006 file - promoters50/4772208
atattttgatttag

SEQ ID NO: 192395 - DNA, 14 bp, Unknown
  misc_feature (1)..( 14): Result.006 file - promoters50/4772208
ttatttggattttt

SEQ ID NO: 192396 - DNA, 14 bp, Unknown
  misc_feature (1)..( 14): Result.006 file - promoters50/4772208
ataatttaaaactg

SEQ ID NO: 192397 - DNA, 14 bp, Unknown
  misc_feature (1)..( 14): Result.006 file - promoters50/4772208
ttatgtggaaaatt

SEQ ID NO: 192398 - DNA, 14 bp, Unknown
  misc_feature (1)..( 14): Result.006 file - promoters50/4772208
gtattcggattttt

SEQ ID NO: 192399 - DNA, 14 bp, Unknown
  misc_feature (1)..( 14): Result.006 file - promoters50/4772208
ataatttcaaataa

SEQ ID NO: 192400 - DNA, 14 bp, Unknown
  misc_feature (1)..( 14): Result.006 file - promoters50/4772208
acaatttcatttat

SEQ ID NO: 192401 - DNA, 10 bp, Unknown
  misc_feature (1)..( 10): Result.006 file - promoters50/4772208
tataaatgtt

SEQ ID NO: 192402 - DNA, 10 bp, Unknown
  misc_feature (1)..( 10): Result.006 file - promoters50/4772208
agtaactgtc

SEQ ID NO: 192403 - DNA, 10 bp, Unknown
  misc_feature (1)..( 10): Result.006 file - promoters50/4772208
atcaaatgta

SEQ ID NO: 192404 - DNA, 10 bp, Unknown
  misc_feature (1)..( 10): Result.006 file - promoters50/4772208
attaattgtt

SEQ ID NO: 192405 - DNA, 10 bp, Unknown
  misc_feature (1)..( 10): Result.006 file - promoters50/4772208
aaagaatgtt

SEQ ID NO: 192406 - DNA, 10 bp, Unknown
  misc_feature (1)..( 10): Result.006 file - promoters50/4772208
attatttgga

SEQ ID NO: 192407 - DNA, 13 bp, Unknown
  misc_feature (1)..( 13): Result.006 file - promoters50/4772208
ttctttcaaaatg

SEQ ID NO: 192408 - DNA, 13 bp, Unknown
  misc_feature (1)..( 13): Result.006 file - promoters50/4772208
atctttcagactt

SEQ ID NO: 192409 - DNA, 13 bp, Unknown
  misc_feature (1)..( 13): Result.006 file - promoters50/4772208
ttctttacggtat

SEQ ID NO: 192410 - DNA, 13 bp, Unknown
  misc_feature (1)..( 13): Result.006 file - promoters50/4772208
taatttcaaataa

SEQ ID NO: 192411 - DNA, 13 bp, Unknown
  misc_feature (1)..( 13): Result.006 file - promoters50/4772208
tgtcatcaaatgt

SEQ ID NO: 192412 - DNA, 13 bp, Unknown
  misc_feature (1)..( 13): Result.006 file - promoters50/4772208
aatgttcaaaact

SEQ ID NO: 192413 - DNA, 13 bp, Unknown
  misc_feature (1)..( 13): Result.006 file - promoters50/4772208
attgttcacataa

SEQ ID NO: 192414 - DNA, 13 bp, Unknown
  misc_feature (1)..( 13): Result.006 file - promoters50/4772208
caatttcatttat

SEQ ID NO: 192415 - DNA, 11 bp, Unknown
  misc_feature (1)..( 11): Result.006 file - promoters50/4772208
ttcacattata

SEQ ID NO: 192416 - DNA, 11 bp, Unknown
  misc_feature (1)..( 11): Result.006 file - promoters50/4772208
gtcaaattaat

SEQ ID NO: 192417 - DNA, 11 bp, Unknown
  misc_feature (1)..( 11): Result.006 file - promoters50/4772208
ttcccatcatc

SEQ ID NO: 192418 - DNA, 11 bp, Unknown
  misc_feature (1)..( 11): Result.006 file - promoters50/4772208
aaataattaat

SEQ ID NO: 192419 - DNA, 11 bp, Unknown
  misc_feature (1)..( 11): Result.006 file - promoters50/4772208
cattaatcaat

SEQ ID NO: 192420 - DNA, 11 bp, Unknown
  misc_feature (1)..( 11): Result.006 file - promoters50/4772212
atcaaatgtag

SEQ ID NO: 192421 - DNA, 8 bp, Unknown
  misc_feature (1)..( 8): Result.006 file - promoters50/4772212
tttgttta

SEQ ID NO: 192422 - DNA, 8 bp, Unknown
  misc_feature (1)..( 8): Result.006 file - promoters50/4772212
agtgttta

SEQ ID NO: 192423 - DNA, 8 bp, Unknown
  misc_feature (1)..( 8): Result.006 file - promoters50/4772212
tttattta

SEQ ID NO: 192424 - DNA, 10 bp, Unknown
  misc_feature (1)..( 10): Result.006 file - promoters50/4772212
tataatattt

SEQ ID NO: 192425 - DNA, 10 bp, Unknown
  misc_feature (1)..( 10): Result.006 file - promoters50/4772212
tatattatat

SEQ ID NO: 192426 - DNA, 10 bp, Unknown
  misc_feature (1)..( 10): Result.006 file - promoters50/4772212
actaatattt

SEQ ID NO: 192427 - DNA, 7 bp, Unknown
  misc_feature (1)..( 7): Result.006 file - promoters50/4772212
cttgtaa

SEQ ID NO: 192428 - DNA, 7 bp, Unknown
  misc_feature (1)..( 7): Result.006 file - promoters50/4772212
cttgtat

SEQ ID NO: 192429 - DNA, 7 bp, Unknown
  misc_feature (1)..( 7): Result.006 file - promoters50/4772212
cttttaa

SEQ ID NO: 192430 - DNA, 9 bp, Unknown
  misc_feature (1)..( 9): Result.006 file - promoters50/4772212
tccaatctt

SEQ ID NO: 192431 - DNA, 9 bp, Unknown
  misc_feature (1)..( 9): Result.006 file - promoters50/4772212
tccaataat

SEQ ID NO: 192432 - DNA, 9 bp, Unknown
  misc_feature (1)..( 9): Result.006 file - promoters50/4772212
cccaaaaat

SEQ ID NO: 192433 - DNA, 9 bp, Unknown
  misc_feature (1)..( 9): Result.006 file - promoters50/4772212
ttttcatat

SEQ ID NO: 192434 - DNA, 9 bp, Unknown
  misc_feature (1)..( 9): Result.006 file - promoters50/4772212
atttcatct

SEQ ID NO: 192435 - DNA, 9 bp, Unknown
  misc_feature (1)..( 9): Result.006 file - promoters50/4772212
ttttcatat

SEQ ID NO: 192436 - DNA, 8 bp, Unknown
  misc_feature (1)..( 8): Result.006 file - promoters50/4772212
ttttgttt

SEQ ID NO: 192437 - DNA, 8 bp, Unknown
  misc_feature (1)..( 8): Result.006 file - promoters50/4772212
ttttattt

SEQ ID NO: 192438 - DNA, 8 bp, Unknown
  misc_feature (1)..( 8): Result.006 file - promoters50/4772212
gtttatta

SEQ ID NO: 192439 - DNA, 8 bp, Unknown
  misc_feature (1)..( 8): Result.006 file - promoters50/4772212
atattttt

SEQ ID NO: 192440 - DNA, 8 bp, Unknown
  misc_feature (1)..( 8): Result.006 file - promoters50/4772212
atactttg

SEQ ID NO: 192441 - DNA, 8 bp, Unknown
  misc_feature (1)..( 8): Result.006 file - promoters50/4772212
aaactttg

SEQ ID NO: 192442 - DNA, 7 bp, Unknown
  misc_feature (1)..( 7): Result.006 file - promoters50/4772212
ctataat

SEQ ID NO: 192443 - DNA, 7 bp, Unknown
  misc_feature (1)..( 7): Result.006 file - promoters50/4772212
ttataat

SEQ ID NO: 192444 - DNA, 7 bp, Unknown
  misc_feature (1)..( 7): Result.006 file - promoters50/4772219
ctataat

SEQ ID NO: 192445 - DNA, 12 bp, Unknown
  misc_feature (1)..( 12): Result.006 file - promoters50/4772219
tataaaaacata

SEQ ID NO: 192446 - DNA, 12 bp, Unknown
  misc_feature (1)..( 12): Result.006 file - promoters50/4772219
tatagaaatgga

SEQ ID NO: 192447 - DNA, 12 bp, Unknown
  misc_feature (1)..( 12): Result.006 file - promoters50/4772219
gttaaaaatcct

SEQ ID NO: 192448 - DNA, 12 bp, Unknown
  misc_feature (1)..( 12): Result.006 file - promoters50/4772223
aatagaaaaata

SEQ ID NO: 192449 - DNA, 9 bp, Unknown
  misc_feature (1)..( 9): Result.006 file - promoters50/4772223
tcttaaata

SEQ ID NO: 192450 - DNA, 9 bp, Unknown
  misc_feature (1)..( 9): Result.006 file - promoters50/4772223
acttatata

SEQ ID NO: 192451 - DNA, 9 bp, Unknown
  misc_feature (1)..( 9): Result.006 file - promoters50/4772223
actaataaa

SEQ ID NO: 192452 - DNA, 9 bp, Unknown
  misc_feature (1)..( 9): Result.006 file - promoters50/4772223
caaacacta

SEQ ID NO: 192453 - DNA, 9 bp, Unknown
  misc_feature (1)..( 9): Result.006 file - promoters50/4772223
aaaacacac

SEQ ID NO: 192454 - DNA, 9 bp, Unknown
  misc_feature (1)..( 9): Result.006 file - promoters50/4772223
caatcactt

SEQ ID NO: 192455 - DNA, 9 bp, Unknown
  misc_feature (1)..( 9): Result.006 file - promoters50/4772223
gaaatacta

SEQ ID NO: 192456 - DNA, 8 bp, Unknown
  misc_feature (1)..( 8): Result.006 file - promoters50/4772223
ataatttt

SEQ ID NO: 192457 - DNA, 8 bp, Unknown
  misc_feature (1)..( 8): Result.006 file - promoters50/4772223
ataattgt

SEQ ID NO: 192458 - DNA, 8 bp, Unknown
  misc_feature (1)..( 8): Result.006 file - promoters50/4772223
ctaatttt

SEQ ID NO: 192459 - DNA, 8 bp, Unknown
  misc_feature (1)..( 8): Result.006 file - promoters50/4772223
acaagaaa

SEQ ID NO: 192460 - DNA, 8 bp, Unknown
  misc_feature (1)..( 8): Result.006 file - promoters50/4772223
acatgaaa

SEQ ID NO: 192461 - DNA, 9 bp, Unknown
  misc_feature (1)..( 9): Result.006 file - promoters50/4772223
caaagtaaa

SEQ ID NO: 192462 - DNA, 9 bp, Unknown
  misc_feature (1)..( 9): Result.006 file - promoters50/4772223
tcaaatcaa

SEQ ID NO: 192463 - DNA, 9 bp, Unknown
  misc_feature (1)..( 9): Result.006 file - promoters50/4772223
tcaaaacaa

SEQ ID NO: 192464 - DNA, 9 bp, Unknown
  misc_feature (1)..( 9): Result.006 file - promoters50/4772223
tgaaaaaaa

SEQ ID NO: 192465 - DNA, 8 bp, Unknown
  misc_feature (1)..( 8): Result.006 file - promoters50/4772223
tttagaca

SEQ ID NO: 192466 - DNA, 8 bp, Unknown
  misc_feature (1)..( 8): Result.006 file - promoters50/4772223
ttttgaca

SEQ ID NO: 192467 - DNA, 8 bp, Unknown
  misc_feature (1)..( 8): Result.006 file - promoters50/4772223
atgagaat

SEQ ID NO: 192468 - DNA, 12 bp, Unknown
  misc_feature (1)..( 12): Result.006 file - promoters50/4772223
atattaaatttt

SEQ ID NO: 192469 - DNA, 12 bp, Unknown
  misc_feature (1)..( 12): Result.006 file - promoters50/4772223
ttatcaaattga

SEQ ID NO: 192470 - DNA, 12 bp, Unknown
  misc_feature (1)..( 12): Result.006 file - promoters50/4772223
ttaccaaaatga

SEQ ID NO: 192471 - DNA, 8 bp, Unknown
  misc_feature (1)..( 8): Result.006 file - promoters50/4772223
gtttaaaa

SEQ ID NO: 192472 - DNA, 8 bp, Unknown
  misc_feature (1)..( 8): Result.006 file - promoters50/4772223
atttcaaa

SEQ ID NO: 192473 - DNA, 8 bp, Unknown
  misc_feature (1)..( 8): Result.006 file - promoters50/4772230
atttcaat

SEQ ID NO: 192474 - DNA, 9 bp, Unknown
  misc_feature (1)..( 9): Result.006 file - promoters50/4772230
aatagtttt

SEQ ID NO: 192475 - DNA, 9 bp, Unknown
  misc_feature (1)..( 9): Result.006 file - promoters50/4772230
aatagattt

SEQ ID NO: 192476 - DNA, 9 bp, Unknown
  misc_feature (1)..( 9): Result.006 file - promoters50/4772230
tgtagattc

SEQ ID NO: 192477 - DNA, 9 bp, Unknown
  misc_feature (1)..( 9): Result.006 file - promoters50/4772230
tgttgatta

SEQ ID NO: 192478 - DNA, 10 bp, Unknown
  misc_feature (1)..( 10): Result.006 file - promoters50/4772230
aaatattaat

SEQ ID NO: 192479 - DNA, 10 bp, Unknown
  misc_feature (1)..( 10): Result.006 file - promoters50/4772230
aaatattcac

SEQ ID NO: 192480 - DNA, 10 bp, Unknown
  misc_feature (1)..( 10): Result.006 file - promoters50/4772230
caatattggc

SEQ ID NO: 192481 - DNA, 10 bp, Unknown
  misc_feature (1)..( 10): Result.006 file - promoters50/4772240
ctatatacac

SEQ ID NO: 192482 - DNA, 16 bp, Unknown
  misc_feature (1)..( 16): Result.006 file - promoters50/4772240
attgttacaaaaagaa

SEQ ID NO: 192483 - DNA, 16 bp, Unknown
  misc_feature (1)..( 16): Result.006 file - promoters50/4772240
attcttataaagtcag

SEQ ID NO: 192484 - DNA, 16 bp, Unknown
  misc_feature (1)..( 16): Result.006 file - promoters50/4772240
ctagatacaaaaaagg

SEQ ID NO: 192485 - DNA, 17 bp, Unknown
  misc_feature (1)..( 17): Result.006 file - promoters50/4772240
tggattacgaaaaaaaa

SEQ ID NO: 192486 - DNA, 17 bp, Unknown
  misc_feature (1)..( 17): Result.006 file - promoters50/4772240
aattttgctaaaaatcc

SEQ ID NO: 192487 - DNA, 17 bp, Unknown
  misc_feature (1)..( 17): Result.006 file - promoters50/4772240
tcgatagctgaaaacga

SEQ ID NO: 192488 - DNA, 18 bp, Unknown
  misc_feature (1)..( 18): Result.006 file - promoters50/4772240
ttttttaagaataaaaag

SEQ ID NO: 192489 - DNA, 15 bp, Unknown
  misc_feature (1)..( 15): Result.006 file - promoters50/4772240
attcattcttcgtga

SEQ ID NO: 192490 - DNA, 15 bp, Unknown
  misc_feature (1)..( 15): Result.006 file - promoters50/4772240
tctaattgttcatga

SEQ ID NO: 192491 - DNA, 15 bp, Unknown
  misc_feature (1)..( 15): Result.006 file - promoters50/4772240
ttgatttgttcctcc

SEQ ID NO: 192492 - DNA, 15 bp, Unknown
  misc_feature (1)..( 15): Result.006 file - promoters50/4772240
taaaatagttttatt

SEQ ID NO: 192493 - DNA, 15 bp, Unknown
  misc_feature (1)..( 15): Result.006 file - promoters50/4772240
gtaaatagacgttag

SEQ ID NO: 192494 - DNA, 15 bp, Unknown
  misc_feature (1)..( 15): Result.006 file - promoters50/4772240
ttgaattgttccccc

SEQ ID NO: 192495 - DNA, 13 bp, Unknown
  misc_feature (1)..( 13): Result.006 file - promoters50/4772240
gttacaaaaagaa

SEQ ID NO: 192496 - DNA, 13 bp, Unknown
  misc_feature (1)..( 13): Result.006 file - promoters50/4772240
atacaaaaaaggc

SEQ ID NO: 192497 - DNA, 13 bp, Unknown
  misc_feature (1)..( 13): Result.006 file - promoters50/4772240
ttacgaaaaaaaa

SEQ ID NO: 192498 - DNA, 13 bp, Unknown
  misc_feature (1)..( 13): Result.006 file - promoters50/4772240
ttgctaaaaatcc

SEQ ID NO: 192499 - DNA, 13 bp, Unknown
  misc_feature (1)..( 13): Result.006 file - promoters50/4772240
agctgaaaacgaa

SEQ ID NO: 192500 - DNA, 13 bp, Unknown
  misc_feature (1)..( 13): Result.006 file - promoters50/4772248
agaataaaaagac

SEQ ID NO: 192501 - DNA, 13 bp, Unknown
  misc_feature (1)..( 13): Result.006 file - promoters50/4772248
tttatgtttagtt

SEQ ID NO: 192502 - DNA, 13 bp, Unknown
  misc_feature (1)..( 13): Result.006 file - promoters50/4772248
ataaagtttagta

SEQ ID NO: 192503 - DNA, 13 bp, Unknown
  misc_feature (1)..( 13): Result.006 file - promoters50/4772248
ctctttttttgtt

SEQ ID NO: 192504 - DNA, 13 bp, Unknown
  misc_feature (1)..( 13): Result.006 file - promoters50/4772248
ggtgtgtttaatc

SEQ ID NO: 192505 - DNA, 13 bp, Unknown
  misc_feature (1)..( 13): Result.006 file - promoters50/4772248
tttctgtttgata

SEQ ID NO: 192506 - DNA, 13 bp, Unknown
  misc_feature (1)..( 13): Result.006 file - promoters50/4772248
ctgacgtttttgt

SEQ ID NO: 192507 - DNA, 13 bp, Unknown
  misc_feature (1)..( 13): Result.006 file - promoters50/4772248
atcgtgtttttga

SEQ ID NO: 192508 - DNA, 13 bp, Unknown
  misc_feature (1)..( 13): Result.006 file - promoters50/4772248
aactttatattct

SEQ ID NO: 192509 - DNA, 13 bp, Unknown
  misc_feature (1)..( 13): Result.006 file - promoters50/4772248
tttaatattttcg

SEQ ID NO: 192510 - DNA, 13 bp, Unknown
  misc_feature (1)..( 13): Result.006 file - promoters50/4772248
caatttatatctt

SEQ ID NO: 192511 - DNA, 13 bp, Unknown
  misc_feature (1)..( 13): Result.006 file - promoters50/4772248
tttattatatagc

SEQ ID NO: 192512 - DNA, 13 bp, Unknown
  misc_feature (1)..( 13): Result.006 file - promoters50/4772248
tatacaatatttt

SEQ ID NO: 192513 - DNA, 13 bp, Unknown
  misc_feature (1)..( 13): Result.006 file - promoters50/4772248
caatttatctaac

SEQ ID NO: 192514 - DNA, 15 bp, Unknown
  misc_feature (1)..( 15): Result.006 file - promoters50/4772248
tctagtttagtttgc

SEQ ID NO: 192515 - DNA, 15 bp, Unknown
  misc_feature (1)..( 15): Result.006 file - promoters50/4772248
actatttttaattat

SEQ ID NO: 192516 - DNA, 15 bp, Unknown
  misc_feature (1)..( 15): Result.006 file - promoters50/4772248
tctaattttgtcaaa

SEQ ID NO: 192517 - DNA, 15 bp, Unknown
  misc_feature (1)..( 15): Result.006 file - promoters50/4772248
ataaattttgattaa

SEQ ID NO: 192518 - DNA, 15 bp, Unknown
  misc_feature (1)..( 15): Result.006 file - promoters50/4772248
tttttttttgtaaac

SEQ ID NO: 192519 - DNA, 15 bp, Unknown
  misc_feature (1)..( 15): Result.006 file - promoters50/4772248
agtcgttttgttttt

SEQ ID NO: 192520 - DNA, 13 bp, Unknown
  misc_feature (1)..( 13): Result.006 file - promoters50/4772248
actgtgtttctat

SEQ ID NO: 192521 - DNA, 13 bp, Unknown
  misc_feature (1)..( 13): Result.006 file - promoters50/4772248
taaatgtttctgt

SEQ ID NO: 192522 - DNA, 13 bp, Unknown
  misc_feature (1)..( 13): Result.006 file - promoters50/4772248
ggtgtgtttaatc

SEQ ID NO: 192523 - DNA, 13 bp, Unknown
  misc_feature (1)..( 13): Result.006 file - promoters50/4772248
atcgtgtttttga

SEQ ID NO: 192524 - DNA, 13 bp, Unknown
  misc_feature (1)..( 13): Result.006 file - promoters50/4772248
atcgggtttttcg

SEQ ID NO: 192525 - DNA, 13 bp, Unknown
  misc_feature (1)..( 13): Result.006 file - promoters50/4772248
tttttgtttctct

SEQ ID NO: 192526 - DNA, 13 bp, Unknown
  misc_feature (1)..( 13): Result.006 file - promoters50/4772248
ctgacgtttttgt

SEQ ID NO: 192527 - DNA, 10 bp, Unknown
  misc_feature (1)..( 10): Result.006 file - promoters50/4772248
acataacttt

SEQ ID NO: 192528 - DNA, 10 bp, Unknown
  misc_feature (1)..( 10): Result.006 file - promoters50/4772248
ttatatcttt

SEQ ID NO: 192529 - DNA, 10 bp, Unknown
  misc_feature (1)..( 10): Result.006 file - promoters50/4772248
gcatcactct

SEQ ID NO: 192530 - DNA, 10 bp, Unknown
  misc_feature (1)..( 10): Result.006 file - promoters50/4772248
tcataaattt

SEQ ID NO: 192531 - DNA, 10 bp, Unknown
  misc_feature (1)..( 10): Result.006 file - promoters50/4772248
taatattttc

SEQ ID NO: 192532 - DNA, 10 bp, Unknown
  misc_feature (1)..( 10): Result.006 file - promoters50/4772248
ccaaaatttc

SEQ ID NO: 192533 - DNA, 10 bp, Unknown
  misc_feature (1)..( 10): Result.006 file - promoters50/4772248
aaataaatat

SEQ ID NO: 192534 - DNA, 10 bp, Unknown
  misc_feature (1)..( 10): Result.006 file - promoters50/4772248
tcaaaaataa

SEQ ID NO: 192535 - DNA, 14 bp, Unknown
  misc_feature (1)..( 14): Result.006 file - promoters50/4772248
catcaaacccacct

SEQ ID NO: 192536 - DNA, 14 bp, Unknown
  misc_feature (1)..( 14): Result.006 file - promoters50/4772248
cataaaactttgaa

SEQ ID NO: 192537 - DNA, 14 bp, Unknown
  misc_feature (1)..( 14): Result.006 file - promoters50/4772248
gataaaattagtga

SEQ ID NO: 192538 - DNA, 14 bp, Unknown
  misc_feature (1)..( 14): Result.006 file - promoters50/4772248
tacaaaacttctct

SEQ ID NO: 192539 - DNA, 14 bp, Unknown
  misc_feature (1)..( 14): Result.006 file - promoters50/4772248
ttccaaaatttctc

SEQ ID NO: 192540 - DNA, 14 bp, Unknown
  misc_feature (1)..( 14): Result.006 file - promoters50/4772248
tcataaattttttt

SEQ ID NO: 192541 - DNA, 15 bp, Unknown
  misc_feature (1)..( 15): Result.006 file - promoters50/4772248
atacttttaatattt

SEQ ID NO: 192542 - DNA, 15 bp, Unknown
  misc_feature (1)..( 15): Result.006 file - promoters50/4772248
tctattttattatat

SEQ ID NO: 192543 - DNA, 15 bp, Unknown
  misc_feature (1)..( 15): Result.006 file - promoters50/4772248
atatttttcataaat

SEQ ID NO: 192544 - DNA, 15 bp, Unknown
  misc_feature (1)..( 15): Result.006 file - promoters50/4772248
atatctttgattttt

SEQ ID NO: 192545 - DNA, 15 bp, Unknown
  misc_feature (1)..( 15): Result.006 file - promoters50/4772248
attttttgcatcact

SEQ ID NO: 192546 - DNA, 15 bp, Unknown
  misc_feature (1)..( 15): Result.006 file - promoters50/4772248
gtttctctcaaaaat

SEQ ID NO: 192547 - DNA, 11 bp, Unknown
  misc_feature (1)..( 11): Result.006 file - promoters50/4772248
ttttataaata

SEQ ID NO: 192548 - DNA, 11 bp, Unknown
  misc_feature (1)..( 11): Result.006 file - promoters50/4772248
cgttattaata

SEQ ID NO: 192549 - DNA, 11 bp, Unknown
  misc_feature (1)..( 11): Result.006 file - promoters50/4772248
gttttttaatt

SEQ ID NO: 192550 - DNA, 11 bp, Unknown
  misc_feature (1)..( 11): Result.006 file - promoters50/4772248
atttatacata

SEQ ID NO: 192551 - DNA, 11 bp, Unknown
  misc_feature (1)..( 11): Result.006 file - promoters50/4772248
ttttgtaaacc

SEQ ID NO: 192552 - DNA, 11 bp, Unknown
  misc_feature (1)..( 11): Result.006 file - promoters50/4772248
agttattctct

SEQ ID NO: 192553 - DNA, 11 bp, Unknown
  misc_feature (1)..( 11): Result.006 file - promoters50/4772248
tgtttttacct

SEQ ID NO: 192554 - DNA, 10 bp, Unknown
  misc_feature (1)..( 10): Result.006 file - promoters50/4772248
tttttaatta

SEQ ID NO: 192555 - DNA, 10 bp, Unknown
  misc_feature (1)..( 10): Result.006 file - promoters50/4772248
attttgatta

SEQ ID NO: 192556 - DNA, 11 bp, Unknown
  misc_feature (1)..( 11): Result.006 file - promoters50/4772248
ttttataatcg

SEQ ID NO: 192557 - DNA, 11 bp, Unknown
  misc_feature (1)..( 11): Result.006 file - promoters50/4772248
ttttctaattt

SEQ ID NO: 192558 - DNA, 11 bp, Unknown
  misc_feature (1)..( 11): Result.006 file - promoters50/4772248
gtttctaaacc

SEQ ID NO: 192559 - DNA, 11 bp, Unknown
  misc_feature (1)..( 11): Result.006 file - promoters50/4772248
gttattctctt

SEQ ID NO: 192560 - DNA, 12 bp, Unknown
  misc_feature (1)..( 12): Result.006 file - promoters50/4772248
gattattttggg

SEQ ID NO: 192561 - DNA, 12 bp, Unknown
  misc_feature (1)..( 12): Result.006 file - promoters50/4772248
ctatatttttca

SEQ ID NO: 192562 - DNA, 12 bp, Unknown
  misc_feature (1)..( 12): Result.006 file - promoters50/4772248
ataaattttttt

SEQ ID NO: 192563 - DNA, 12 bp, Unknown
  misc_feature (1)..( 12): Result.006 file - promoters50/4772248
tttgatttttga

SEQ ID NO: 192564 - DNA, 12 bp, Unknown
  misc_feature (1)..( 12): Result.006 file - promoters50/4772248
caaaatttctca

SEQ ID NO: 192565 - DNA, 12 bp, Unknown
  misc_feature (1)..( 12): Result.006 file - promoters50/4772248
caaaacttctct

SEQ ID NO: 192566 - DNA, 15 bp, Unknown
  misc_feature (1)..( 15): Result.006 file - promoters50/4772248
ttcggttataaagtt

SEQ ID NO: 192567 - DNA, 15 bp, Unknown
  misc_feature (1)..( 15): Result.006 file - promoters50/4772248
caaacttataagtct

SEQ ID NO: 192568 - DNA, 15 bp, Unknown
  misc_feature (1)..( 15): Result.006 file - promoters50/4772248
atcacttgtaaatgt

SEQ ID NO: 192569 - DNA, 15 bp, Unknown
  misc_feature (1)..( 15): Result.006 file - promoters50/4772248
tgtttttgaaaatcg

SEQ ID NO: 192570 - DNA, 15 bp, Unknown
  misc_feature (1)..( 15): Result.006 file - promoters50/4772248
ctctcttaaaagtct

SEQ ID NO: 192571 - DNA, 15 bp, Unknown
  misc_feature (1)..( 15): Result.006 file - promoters50/4772248
caaacatatatacaa

SEQ ID NO: 192572 - DNA, 10 bp, Unknown
  misc_feature (1)..( 10): Result.006 file - promoters50/4772248
aaaactttga

SEQ ID NO: 192573 - DNA, 10 bp, Unknown
  misc_feature (1)..( 10): Result.006 file - promoters50/4772248
caaaatttct

SEQ ID NO: 192574 - DNA, 10 bp, Unknown
  misc_feature (1)..( 10): Result.006 file - promoters50/4772248
tgaactttta

SEQ ID NO: 192575 - DNA, 10 bp, Unknown
  misc_feature (1)..( 10): Result.006 file - promoters50/4772248
aaaacttctc

SEQ ID NO: 192576 - DNA, 10 bp, Unknown
  misc_feature (1)..( 10): Result.006 file - promoters50/4772248
ataaatatct

SEQ ID NO: 192577 - DNA, 10 bp, Unknown
  misc_feature (1)..( 10): Result.006 file - promoters50/4772258
ataaattttt

SEQ ID NO: 192578 - DNA, 8 bp, Unknown
  misc_feature (1)..( 8): Result.006 file - promoters50/4772258
tgttgttg

SEQ ID NO: 192579 - DNA, 8 bp, Unknown
  misc_feature (1)..( 8): Result.006 file - promoters50/4772258
tgttgttt

SEQ ID NO: 192580 - DNA, 8 bp, Unknown
  misc_feature (1)..( 8): Result.006 file - promoters50/4772258
agtttttt

SEQ ID NO: 192581 - DNA, 8 bp, Unknown
  misc_feature (1)..( 8): Result.006 file - promoters50/4772258
cgtttttt

SEQ ID NO: 192582 - DNA, 9 bp, Unknown
  misc_feature (1)..( 9): Result.006 file - promoters50/4772258
attttttat

SEQ ID NO: 192583 - DNA, 9 bp, Unknown
  misc_feature (1)..( 9): Result.006 file - promoters50/4772258
atttttcgt

SEQ ID NO: 192584 - DNA, 9 bp, Unknown
  misc_feature (1)..( 9): Result.006 file - promoters50/4772258
gttttatat

SEQ ID NO: 192585 - DNA, 9 bp, Unknown
  misc_feature (1)..( 9): Result.006 file - promoters50/4772274
tttttttgt

SEQ ID NO: 192586 - DNA, 8 bp, Unknown
  misc_feature (1)..( 8): Result.006 file - promoters50/4772274
attcttct

SEQ ID NO: 192587 - DNA, 8 bp, Unknown
  misc_feature (1)..( 8): Result.006 file - promoters50/4772274
attcttta

SEQ ID NO: 192588 - DNA, 8 bp, Unknown
  misc_feature (1)..( 8): Result.006 file - promoters50/4772274
gttctttt

SEQ ID NO: 192589 - DNA, 8 bp, Unknown
  misc_feature (1)..( 8): Result.006 file - promoters50/4772274
tttcttta

SEQ ID NO: 192590 - DNA, 9 bp, Unknown
  misc_feature (1)..( 9): Result.006 file - promoters50/4772274
tttcatttg

SEQ ID NO: 192591 - DNA, 9 bp, Unknown
  misc_feature (1)..( 9): Result.006 file - promoters50/4772274
atttctttt

SEQ ID NO: 192592 - DNA, 6 bp, Unknown
  misc_feature (1)..( 6): Result.006 file - promoters50/4772274
ttcttt

SEQ ID NO: 192593 - DNA, 6 bp, Unknown
  misc_feature (1)..( 6): Result.006 file - promoters50/4772274
ttcttt

SEQ ID NO: 192594 - DNA, 6 bp, Unknown
  misc_feature (1)..( 6): Result.006 file - promoters50/4772274
ttcttt

SEQ ID NO: 192595 - DNA, 6 bp, Unknown
  misc_feature (1)..( 6): Result.006 file - promoters50/4772274
ttcttt

SEQ ID NO: 192596 - DNA, 7 bp, Unknown
  misc_feature (1)..( 7): Result.006 file - promoters50/4772274
ttcattt

SEQ ID NO: 192597 - DNA, 7 bp, Unknown
  misc_feature (1)..( 7): Result.006 file - promoters50/4772274
tttcttt

SEQ ID NO: 192598 - DNA, 16 bp, Unknown
  misc_feature (1)..( 16): Result.006 file - promoters50/4772274
aaaaaaaggttatctc

SEQ ID NO: 192599 - DNA, 16 bp, Unknown
  misc_feature (1)..( 16): Result.006 file - promoters50/4772274
atacaaaagttatcat

SEQ ID NO: 192600 - DNA, 16 bp, Unknown
  misc_feature (1)..( 16): Result.006 file - promoters50/4772274
tgagttagtttaccat

SEQ ID NO: 192601 - DNA, 16 bp, Unknown
  misc_feature (1)..( 16): Result.006 file - promoters50/4772274
ataccaaatttaatgt

SEQ ID NO: 192602 - DNA, 16 bp, Unknown
  misc_feature (1)..( 16): Result.006 file - promoters50/4772274
ctaccaaacttatctt

SEQ ID NO: 192603 - DNA, 16 bp, Unknown
  misc_feature (1)..( 16): Result.006 file - promoters50/4772285
atatcaaactcgatta

SEQ ID NO: 192604 - DNA, 12 bp, Unknown
  misc_feature (1)..( 12): Result.006 file - promoters50/4772285
gataatgaaagt

SEQ ID NO: 192605 - DNA, 12 bp, Unknown
  misc_feature (1)..( 12): Result.006 file - promoters50/4772285
ctaaataaaagt

SEQ ID NO: 192606 - DNA, 12 bp, Unknown
  misc_feature (1)..( 12): Result.006 file - promoters50/4772285
gataattaaaag

SEQ ID NO: 192607 - DNA, 7 bp, Unknown
  misc_feature (1)..( 7): Result.006 file - promoters50/4772285
aaaataa

SEQ ID NO: 192608 - DNA, 7 bp, Unknown
  misc_feature (1)..( 7): Result.006 file - promoters50/4772285
aaaataa

SEQ ID NO: 192609 - DNA, 7 bp, Unknown
  misc_feature (1)..( 7): Result.006 file - promoters50/4772285
aaaaaag

SEQ ID NO: 192610 - DNA, 9 bp, Unknown
  misc_feature (1)..( 9): Result.006 file - promoters50/4772285
taaaattgt

SEQ ID NO: 192611 - DNA, 9 bp, Unknown
  misc_feature (1)..( 9): Result.006 file - promoters50/4772285
taatattat

SEQ ID NO: 192612 - DNA, 9 bp, Unknown
  misc_feature (1)..( 9): Result.006 file - promoters50/4772285
gaattttat

SEQ ID NO: 192613 - DNA, 10 bp, Unknown
  misc_feature (1)..( 10): Result.006 file - promoters50/4772285
caaaaatgta

SEQ ID NO: 192614 - DNA, 10 bp, Unknown
  misc_feature (1)..( 10): Result.006 file - promoters50/4772285
caaaaaagta

SEQ ID NO: 192615 - DNA, 10 bp, Unknown
  misc_feature (1)..( 10): Result.006 file - promoters50/4772289
agaaaataaa

SEQ ID NO: 192616 - DNA, 8 bp, Unknown
  misc_feature (1)..( 8): Result.006 file - promoters50/4772289
gaatcaat

SEQ ID NO: 192617 - DNA, 8 bp, Unknown
  misc_feature (1)..( 8): Result.006 file - promoters50/4772289
gaaacaaa

SEQ ID NO: 192618 - DNA, 8 bp, Unknown
  misc_feature (1)..( 8): Result.006 file - promoters50/4772289
gaaagaaa

SEQ ID NO: 192619 - DNA, 7 bp, Unknown
  misc_feature (1)..( 7): Result.006 file - promoters50/4772289
agatgtc

SEQ ID NO: 192620 - DNA, 7 bp, Unknown
  misc_feature (1)..( 7): Result.006 file - promoters50/4772289
agatgtg

SEQ ID NO: 192621 - DNA, 7 bp, Unknown
  misc_feature (1)..( 7): Result.006 file - promoters50/4772311
tgatgtg

SEQ ID NO: 192622 - DNA, 10 bp, Unknown
  misc_feature (1)..( 10): Result.006 file - promoters50/4772311
caaaacaaga

SEQ ID NO: 192623 - DNA, 10 bp, Unknown
  misc_feature (1)..( 10): Result.006 file - promoters50/4772311
aaaatcaagt

SEQ ID NO: 192624 - DNA, 10 bp, Unknown
  misc_feature (1)..( 10): Result.006 file - promoters50/4772311
aaaaacatat

SEQ ID NO: 192625 - DNA, 10 bp, Unknown
  misc_feature (1)..( 10): Result.006 file - promoters50/4772311
taaaccaagc

SEQ ID NO: 192626 - DNA, 10 bp, Unknown
  misc_feature (1)..( 10): Result.006 file - promoters50/4772311
aaaatcgtaa

SEQ ID NO: 192627 - DNA, 10 bp, Unknown
  misc_feature (1)..( 10): Result.006 file - promoters50/4772311
aaaaatggat

SEQ ID NO: 192628 - DNA, 10 bp, Unknown
  misc_feature (1)..( 10): Result.006 file - promoters50/4772311
taaaataatc

SEQ ID NO: 192629 - DNA, 10 bp, Unknown
  misc_feature (1)..( 10): Result.006 file - promoters50/4772311
tcaaacattg

SEQ ID NO: 192630 - DNA, 11 bp, Unknown
  misc_feature (1)..( 11): Result.006 file - promoters50/4772311
aaacttcatgt

SEQ ID NO: 192631 - DNA, 11 bp, Unknown
  misc_feature (1)..( 11): Result.006 file - promoters50/4772311
aaatttcataa

SEQ ID NO: 192632 - DNA, 11 bp, Unknown
  misc_feature (1)..( 11): Result.006 file - promoters50/4772311
aaaattcccaa

SEQ ID NO: 192633 - DNA, 11 bp, Unknown
  misc_feature (1)..( 11): Result.006 file - promoters50/4772311
aatgttcatat

SEQ ID NO: 192634 - DNA, 11 bp, Unknown
  misc_feature (1)..( 11): Result.006 file - promoters50/4772311
gtattttataa

SEQ ID NO: 192635 - DNA, 11 bp, Unknown
  misc_feature (1)..( 11): Result.006 file - promoters50/4772311
taatctcaacg

SEQ ID NO: 192636 - DNA, 13 bp, Unknown
  misc_feature (1)..( 13): Result.006 file - promoters50/4772311
atgatgtttctct

SEQ ID NO: 192637 - DNA, 13 bp, Unknown
  misc_feature (1)..( 13): Result.006 file - promoters50/4772311
caaatgtttgtct

SEQ ID NO: 192638 - DNA, 13 bp, Unknown
  misc_feature (1)..( 13): Result.006 file - promoters50/4772311
tagatattttttt

SEQ ID NO: 192639 - DNA, 13 bp, Unknown
  misc_feature (1)..( 13): Result.006 file - promoters50/4772311
aaaatgttaggtc

SEQ ID NO: 192640 - DNA, 13 bp, Unknown
  misc_feature (1)..( 13): Result.006 file - promoters50/4772311
aaaatgttgaata

SEQ ID NO: 192641 - DNA, 13 bp, Unknown
  misc_feature (1)..( 13): Result.006 file - promoters50/4772311
aaaatgttttatt

SEQ ID NO: 192642 - DNA, 14 bp, Unknown
  misc_feature (1)..( 14): Result.006 file - promoters50/4772311
tgtttataaaaaaa

SEQ ID NO: 192643 - DNA, 14 bp, Unknown
  misc_feature (1)..( 14): Result.006 file - promoters50/4772311
cacatataaataaa

SEQ ID NO: 192644 - DNA, 14 bp, Unknown
  misc_feature (1)..( 14): Result.006 file - promoters50/4772311
attttataattatt

SEQ ID NO: 192645 - DNA, 14 bp, Unknown
  misc_feature (1)..( 14): Result.006 file - promoters50/4772311
gattacgaaaaaat

SEQ ID NO: 192646 - DNA, 14 bp, Unknown
  misc_feature (1)..( 14): Result.006 file - promoters50/4772311
atttcataaccgtt

SEQ ID NO: 192647 - DNA, 14 bp, Unknown
  misc_feature (1)..( 14): Result.006 file - promoters50/4772311
ctaaaataatctca

SEQ ID NO: 192648 - DNA, 11 bp, Unknown
  misc_feature (1)..( 11): Result.006 file - promoters50/4772311
aaacgaaaaaa

SEQ ID NO: 192649 - DNA, 11 bp, Unknown
  misc_feature (1)..( 11): Result.006 file - promoters50/4772311
tccagaagaaa

SEQ ID NO: 192650 - DNA, 11 bp, Unknown
  misc_feature (1)..( 11): Result.006 file - promoters50/4772311
aatggaaaaac

SEQ ID NO: 192651 - DNA, 12 bp, Unknown
  misc_feature (1)..( 12): Result.006 file - promoters50/4772311
ttagtaaataaa

SEQ ID NO: 192652 - DNA, 12 bp, Unknown
  misc_feature (1)..( 12): Result.006 file - promoters50/4772311
ttgagaaagaaa

SEQ ID NO: 192653 - DNA, 12 bp, Unknown
  misc_feature (1)..( 12): Result.006 file - promoters50/4772311
ttgacaaaaaaa

SEQ ID NO: 192654 - DNA, 12 bp, Unknown
  misc_feature (1)..( 12): Result.006 file - promoters50/4772311
tggagaaacgac

SEQ ID NO: 192655 - DNA, 14 bp, Unknown
  misc_feature (1)..( 14): Result.006 file - promoters50/4772311
acgaaaaaaataca

SEQ ID NO: 192656 - DNA, 14 bp, Unknown
  misc_feature (1)..( 14): Result.006 file - promoters50/4772311
agaagaaagatatt

SEQ ID NO: 192657 - DNA, 14 bp, Unknown
  misc_feature (1)..( 14): Result.006 file - promoters50/4772311
aatggaaaaacagg

SEQ ID NO: 192658 - DNA, 14 bp, Unknown
  misc_feature (1)..( 14): Result.006 file - promoters50/4772311
aattagtaaataaa

SEQ ID NO: 192659 - DNA, 14 bp, Unknown
  misc_feature (1)..( 14): Result.006 file - promoters50/4772311
acaagaaagagaga

SEQ ID NO: 192660 - DNA, 14 bp, Unknown
  misc_feature (1)..( 14): Result.006 file - promoters50/4772311
ttgacaaaaaaaaa

SEQ ID NO: 192661 - DNA, 14 bp, Unknown
  misc_feature (1)..( 14): Result.006 file - promoters50/4772311
aaaaattaaacaga

SEQ ID NO: 192662 - DNA, 14 bp, Unknown
  misc_feature (1)..( 14): Result.006 file - promoters50/4772311
tggagaaacgacgc

SEQ ID NO: 192663 - DNA, 9 bp, Unknown
  misc_feature (1)..( 9): Result.006 file - promoters50/4772311
tatttctat

SEQ ID NO: 192664 - DNA, 9 bp, Unknown
  misc_feature (1)..( 9): Result.006 file - promoters50/4772311
ggtttctag

SEQ ID NO: 192665 - DNA, 9 bp, Unknown
  misc_feature (1)..( 9): Result.006 file - promoters50/4772311
agtttttat

SEQ ID NO: 192666 - DNA, 9 bp, Unknown
  misc_feature (1)..( 9): Result.006 file - promoters50/4772311
cttttctaa

SEQ ID NO: 192667 - DNA, 9 bp, Unknown
  misc_feature (1)..( 9): Result.006 file - promoters50/4772311
tgttattaa

SEQ ID NO: 192668 - DNA, 9 bp, Unknown
  misc_feature (1)..( 9): Result.006 file - promoters50/4772311
tgttattcg

SEQ ID NO: 192669 - DNA, 14 bp, Unknown
  misc_feature (1)..( 14): Result.006 file - promoters50/4772311
attaaaaaggaaga

SEQ ID NO: 192670 - DNA, 14 bp, Unknown
  misc_feature (1)..( 14): Result.006 file - promoters50/4772311
tttaaaaattccac

SEQ ID NO: 192671 - DNA, 14 bp, Unknown
  misc_feature (1)..( 14): Result.006 file - promoters50/4772311
aaaaaaaaagaaga

SEQ ID NO: 192672 - DNA, 14 bp, Unknown
  misc_feature (1)..( 14): Result.006 file - promoters50/4772311
tttaaacgccgtcg

SEQ ID NO: 192673 - DNA, 14 bp, Unknown
  misc_feature (1)..( 14): Result.006 file - promoters50/4772311
ttgaaaaaaactgc

SEQ ID NO: 192674 - DNA, 14 bp, Unknown
  misc_feature (1)..( 14): Result.006 file - promoters50/4772315
accaaaaaaaagtc

SEQ ID NO: 192675 - DNA, 16 bp, Unknown
  misc_feature (1)..( 16): Result.006 file - promoters50/4772315
ttgattttactttatt

SEQ ID NO: 192676 - DNA, 16 bp, Unknown
  misc_feature (1)..( 16): Result.006 file - promoters50/4772315
tccgtttttcttataa

SEQ ID NO: 192677 - DNA, 16 bp, Unknown
  misc_feature (1)..( 16): Result.006 file - promoters50/4772315
ttcgtttttggtttaa

SEQ ID NO: 192678 - DNA, 16 bp, Unknown
  misc_feature (1)..( 16): Result.006 file - promoters50/4772315
tagaattttctggttt

SEQ ID NO: 192679 - DNA, 16 bp, Unknown
  misc_feature (1)..( 16): Result.006 file - promoters50/4772315
ttgattttactttatt

SEQ ID NO: 192680 - DNA, 16 bp, Unknown
  misc_feature (1)..( 16): Result.006 file - promoters50/4772323
taggattctctcgaaa

SEQ ID NO: 192681 - DNA, 9 bp, Unknown
  misc_feature (1)..( 9): Result.006 file - promoters50/4772323
aattaacta

SEQ ID NO: 192682 - DNA, 9 bp, Unknown
  misc_feature (1)..( 9): Result.006 file - promoters50/4772323
gtttatcta

SEQ ID NO: 192683 - DNA, 9 bp, Unknown
  misc_feature (1)..( 9): Result.006 file - promoters50/4772323
ttttgtctg

SEQ ID NO: 192684 - DNA, 9 bp, Unknown
  misc_feature (1)..( 9): Result.006 file - promoters50/4772323
ttttgttgc

SEQ ID NO: 192685 - DNA, 9 bp, Unknown
  misc_feature (1)..( 9): Result.006 file - promoters50/4772329
ttttgtatg

SEQ ID NO: 192686 - DNA, 7 bp, Unknown
  misc_feature (1)..( 7): Result.006 file - promoters50/4772329
aaaacaa

SEQ ID NO: 192687 - DNA, 7 bp, Unknown
  misc_feature (1)..( 7): Result.006 file - promoters50/4772329
aaaacat

SEQ ID NO: 192688 - DNA, 7 bp, Unknown
  misc_feature (1)..( 7): Result.006 file - promoters50/4772329
taaacat

SEQ ID NO: 192689 - DNA, 8 bp, Unknown
  misc_feature (1)..( 8): Result.006 file - promoters50/4772329
attgttta

SEQ ID NO: 192690 - DNA, 8 bp, Unknown
  misc_feature (1)..( 8): Result.006 file - promoters50/4772329
tttgttta

SEQ ID NO: 192691 - DNA, 8 bp, Unknown
  misc_feature (1)..( 8): Result.006 file - promoters50/4772329
tttggttg

SEQ ID NO: 192692 - DNA, 9 bp, Unknown
  misc_feature (1)..( 9): Result.006 file - promoters50/4772329
taacttaat

SEQ ID NO: 192693 - DNA, 9 bp, Unknown
  misc_feature (1)..( 9): Result.006 file - promoters50/4772329
taagttata

SEQ ID NO: 192694 - DNA, 9 bp, Unknown
  misc_feature (1)..( 9): Result.006 file - promoters50/4772329
ttactcaat

SEQ ID NO: 192695 - DNA, 7 bp, Unknown
  misc_feature (1)..( 7): Result.006 file - promoters50/4772329
ttatatc

SEQ ID NO: 192696 - DNA, 7 bp, Unknown
  misc_feature (1)..( 7): Result.006 file - promoters50/4772329
ttatata

SEQ ID NO: 192697 - DNA, 7 bp, Unknown
  misc_feature (1)..( 7): Result.006 file - promoters50/4772329
gtatata

SEQ ID NO: 192698 - DNA, 7 bp, Unknown
  misc_feature (1)..( 7): Result.006 file - promoters50/4772329
attattg

SEQ ID NO: 192699 - DNA, 7 bp, Unknown
  misc_feature (1)..( 7): Result.006 file - promoters50/4772329
attatta

SEQ ID NO: 192700 - DNA, 7 bp, Unknown
  misc_feature (1)..( 7): Result.006 file - promoters50/4772329
attttta

SEQ ID NO: 192701 - DNA, 8 bp, Unknown
  misc_feature (1)..( 8): Result.006 file - promoters50/4772329
aatattca

SEQ ID NO: 192702 - DNA, 8 bp, Unknown
  misc_feature (1)..( 8): Result.006 file - promoters50/4772329
tatattca

SEQ ID NO: 192703 - DNA, 8 bp, Unknown
  misc_feature (1)..( 8): Result.006 file - promoters50/4772329
aatatttt

SEQ ID NO: 192704 - DNA, 8 bp, Unknown
  misc_feature (1)..( 8): Result.006 file - promoters50/4772329
tatatttt

SEQ ID NO: 192705 - DNA, 12 bp, Unknown
  misc_feature (1)..( 12): Result.006 file - promoters50/4772329
atagtatacacg

SEQ ID NO: 192706 - DNA, 12 bp, Unknown
  misc_feature (1)..( 12): Result.006 file - promoters50/4772329
atagtttacatt

SEQ ID NO: 192707 - DNA, 12 bp, Unknown
  misc_feature (1)..( 12): Result.006 file - promoters50/4772329
tttacatacacg

SEQ ID NO: 192708 - DNA, 8 bp, Unknown
  misc_feature (1)..( 8): Result.006 file - promoters50/4772329
aaacatta

SEQ ID NO: 192709 - DNA, 8 bp, Unknown
  misc_feature (1)..( 8): Result.006 file - promoters50/4772329
aaatatta

SEQ ID NO: 192710 - DNA, 8 bp, Unknown
  misc_feature (1)..( 8): Result.006 file - promoters50/4772329
tcacatta

SEQ ID NO: 192711 - DNA, 10 bp, Unknown
  misc_feature (1)..( 10): Result.006 file - promoters50/4772329
ctttatataa

SEQ ID NO: 192712 - DNA, 10 bp, Unknown
  misc_feature (1)..( 10): Result.006 file - promoters50/4772329
gtctatataa

SEQ ID NO: 192713 - DNA, 10 bp, Unknown
  misc_feature (1)..( 10): Result.006 file - promoters50/4772329
ctttatatat

SEQ ID NO: 192714 - DNA, 10 bp, Unknown
  misc_feature (1)..( 10): Result.006 file - promoters50/4772329
gcgtatttaa

SEQ ID NO: 192715 - DNA, 8 bp, Unknown
  misc_feature (1)..( 8): Result.006 file - promoters50/4772329
tacttctc

SEQ ID NO: 192716 - DNA, 8 bp, Unknown
  misc_feature (1)..( 8): Result.006 file - promoters50/4772329
ttcttctc

SEQ ID NO: 192717 - DNA, 8 bp, Unknown
  misc_feature (1)..( 8): Result.006 file - promoters50/4772336
ttcttcta

SEQ ID NO: 192718 - DNA, 19 bp, Unknown
  misc_feature (1)..( 19): Result.006 file - promoters50/4772336
gatcatctaaaaattgaca

SEQ ID NO: 192719 - DNA, 19 bp, Unknown
  misc_feature (1)..( 19): Result.006 file - promoters50/4772336
ccaactatccaaaatgaaa

SEQ ID NO: 192720 - DNA, 19 bp, Unknown
  misc_feature (1)..( 19): Result.006 file - promoters50/4772336
aactgatttttcattaaca

SEQ ID NO: 192721 - DNA, 19 bp, Unknown
  misc_feature (1)..( 19): Result.006 file - promoters50/4772336
ttcggaacacaaaattact

SEQ ID NO: 192722 - DNA, 19 bp, Unknown
  misc_feature (1)..( 19): Result.006 file - promoters50/4772336
ataatcaatcaaataaaca

SEQ ID NO: 192723 - DNA, 19 bp, Unknown
  misc_feature (1)..( 19): Result.006 file - promoters50/4772336
atagtcaaacaaatgtttg

SEQ ID NO: 192724 - DNA, 19 bp, Unknown
  misc_feature (1)..( 19): Result.006 file - promoters50/4772336
tacacatatcatagttata

SEQ ID NO: 192725 - DNA, 11 bp, Unknown
  misc_feature (1)..( 11): Result.006 file - promoters50/4772336
ctctatataaa

SEQ ID NO: 192726 - DNA, 11 bp, Unknown
  misc_feature (1)..( 11): Result.006 file - promoters50/4772336
cattatatata

SEQ ID NO: 192727 - DNA, 11 bp, Unknown
  misc_feature (1)..( 11): Result.006 file - promoters50/4772336
tgagatataat

SEQ ID NO: 192728 - DNA, 11 bp, Unknown
  misc_feature (1)..( 11): Result.006 file - promoters50/4772336
gcctatatata

SEQ ID NO: 192729 - DNA, 11 bp, Unknown
  misc_feature (1)..( 11): Result.006 file - promoters50/4772336
tcctttatatt

SEQ ID NO: 192730 - DNA, 11 bp, Unknown
  misc_feature (1)..( 11): Result.006 file - promoters50/4772336
tagtataaata

SEQ ID NO: 192731 - DNA, 11 bp, Unknown
  misc_feature (1)..( 11): Result.006 file - promoters50/4772336
aaatataaata

SEQ ID NO: 192732 - DNA, 11 bp, Unknown
  misc_feature (1)..( 11): Result.006 file - promoters50/4772336
gtgtataaatt

SEQ ID NO: 192733 - DNA, 12 bp, Unknown
  misc_feature (1)..( 12): Result.006 file - promoters50/4772336
ccttgagtttag

SEQ ID NO: 192734 - DNA, 12 bp, Unknown
  misc_feature (1)..( 12): Result.006 file - promoters50/4772336
tgttgaattttg

SEQ ID NO: 192735 - DNA, 12 bp, Unknown
  misc_feature (1)..( 12): Result.006 file - promoters50/4772336
atttgaataatt

SEQ ID NO: 192736 - DNA, 12 bp, Unknown
  misc_feature (1)..( 12): Result.006 file - promoters50/4772336
tgagaaatttca

SEQ ID NO: 192737 - DNA, 12 bp, Unknown
  misc_feature (1)..( 12): Result.006 file - promoters50/4772336
ggtaaaatttca

SEQ ID NO: 192738 - DNA, 12 bp, Unknown
  misc_feature (1)..( 12): Result.006 file - promoters50/4772340
attttaatagac

SEQ ID NO: 192739 - DNA, 11 bp, Unknown
  misc_feature (1)..( 11): Result.006 file - promoters50/4772340
gtatataaata

SEQ ID NO: 192740 - DNA, 11 bp, Unknown
  misc_feature (1)..( 11): Result.006 file - promoters50/4772340
tgttataaaac

SEQ ID NO: 192741 - DNA, 11 bp, Unknown
  misc_feature (1)..( 11): Result.006 file - promoters50/4772340
atctataaaaa

SEQ ID NO: 192742 - DNA, 11 bp, Unknown
  misc_feature (1)..( 11): Result.006 file - promoters50/4772340
aactataaata

SEQ ID NO: 192743 - DNA, 11 bp, Unknown
  misc_feature (1)..( 11): Result.006 file - promoters50/4772340
ctatataaacc

SEQ ID NO: 192744 - DNA, 11 bp, Unknown
  misc_feature (1)..( 11): Result.006 file - promoters50/4772340
ctatatatata

SEQ ID NO: 192745 - DNA, 11 bp, Unknown
  misc_feature (1)..( 11): Result.006 file - promoters50/4772340
aattaatgttt

SEQ ID NO: 192746 - DNA, 11 bp, Unknown
  misc_feature (1)..( 11): Result.006 file - promoters50/4772340
aatcaatcttt

SEQ ID NO: 192747 - DNA, 11 bp, Unknown
  misc_feature (1)..( 11): Result.006 file - promoters50/4772340
cattaatatga

SEQ ID NO: 192748 - DNA, 11 bp, Unknown
  misc_feature (1)..( 11): Result.006 file - promoters50/4772340
tattaattgcg

SEQ ID NO: 192749 - DNA, 11 bp, Unknown
  misc_feature (1)..( 11): Result.006 file - promoters50/4772340
catttattttt

SEQ ID NO: 192750 - DNA, 11 bp, Unknown
  misc_feature (1)..( 11): Result.006 file - promoters50/4772346
gatctatcatt

SEQ ID NO: 192751 - DNA, 10 bp, Unknown
  misc_feature (1)..( 10): Result.006 file - promoters50/4772346
agatacttaa

SEQ ID NO: 192752 - DNA, 11 bp, Unknown
  misc_feature (1)..( 11): Result.006 file - promoters50/4772346
tagatacagtg

SEQ ID NO: 192753 - DNA, 11 bp, Unknown
  misc_feature (1)..( 11): Result.006 file - promoters50/4772346
ccgatccagaa

SEQ ID NO: 192754 - DNA, 11 bp, Unknown
  misc_feature (1)..( 11): Result.006 file - promoters50/4772346
cagagacatca

SEQ ID NO: 192755 - DNA, 11 bp, Unknown
  misc_feature (1)..( 11): Result.006 file - promoters50/4772346
cagcgacttca

SEQ ID NO: 192756 - DNA, 11 bp, Unknown
  misc_feature (1)..( 11): Result.006 file - promoters50/4772370
gagatatcgta

SEQ ID NO: 192757 - DNA, 12 bp, Unknown
  misc_feature (1)..( 12): Result.006 file - promoters50/4772370
atggaatagatc

SEQ ID NO: 192758 - DNA, 12 bp, Unknown
  misc_feature (1)..( 12): Result.006 file - promoters50/4772370
atgtaatgacac

SEQ ID NO: 192759 - DNA, 12 bp, Unknown
  misc_feature (1)..( 12): Result.006 file - promoters50/4772370
aagtaataacac

SEQ ID NO: 192760 - DNA, 11 bp, Unknown
  misc_feature (1)..( 11): Result.006 file - promoters50/4772370
aaaaaaaagag

SEQ ID NO: 192761 - DNA, 11 bp, Unknown
  misc_feature (1)..( 11): Result.006 file - promoters50/4772370
aaaaaagggtc

SEQ ID NO: 192762 - DNA, 12 bp, Unknown
  misc_feature (1)..( 12): Result.006 file - promoters50/4772370
aaaagaaacaaa

SEQ ID NO: 192763 - DNA, 7 bp, Unknown
  misc_feature (1)..( 7): Result.006 file - promoters50/4772370
attaaaa

SEQ ID NO: 192764 - DNA, 7 bp, Unknown
  misc_feature (1)..( 7): Result.006 file - promoters50/4772370
attaaaa

SEQ ID NO: 192765 - DNA, 8 bp, Unknown
  misc_feature (1)..( 8): Result.006 file - promoters50/4772370
attgaaaa

SEQ ID NO: 192766 - DNA, 8 bp, Unknown
  misc_feature (1)..( 8): Result.006 file - promoters50/4772370
tataaaag

SEQ ID NO: 192767 - DNA, 8 bp, Unknown
  misc_feature (1)..( 8): Result.006 file - promoters50/4772370
tataaaaa

SEQ ID NO: 192768 - DNA, 8 bp, Unknown
  misc_feature (1)..( 8): Result.006 file - promoters50/4772378
attaaaaa

SEQ ID NO: 192769 - DNA, 14 bp, Unknown
  misc_feature (1)..( 14): Result.006 file - promoters50/4772378
aggtttgagttatt

SEQ ID NO: 192770 - DNA, 14 bp, Unknown
  misc_feature (1)..( 14): Result.006 file - promoters50/4772378
gggtttgggcgagg

SEQ ID NO: 192771 - DNA, 14 bp, Unknown
  misc_feature (1)..( 14): Result.006 file - promoters50/4772378
tagttttaaggtta

SEQ ID NO: 192772 - DNA, 14 bp, Unknown
  misc_feature (1)..( 14): Result.006 file - promoters50/4772378
ttgtttgaaaagtc

SEQ ID NO: 192773 - DNA, 14 bp, Unknown
  misc_feature (1)..( 14): Result.006 file - promoters50/4772378
atatttgaatagtc

SEQ ID NO: 192774 - DNA, 14 bp, Unknown
  misc_feature (1)..( 14): Result.006 file - promoters50/4772382
acgttttagaggca

SEQ ID NO: 192775 - DNA, 9 bp, Unknown
  misc_feature (1)..( 9): Result.006 file - promoters50/4772382
atatataaa

SEQ ID NO: 192776 - DNA, 9 bp, Unknown
  misc_feature (1)..( 9): Result.006 file - promoters50/4772382
ccttataaa

SEQ ID NO: 192777 - DNA, 9 bp, Unknown
  misc_feature (1)..( 9): Result.006 file - promoters50/4772382
ttatttaag

SEQ ID NO: 192778 - DNA, 9 bp, Unknown
  misc_feature (1)..( 9): Result.006 file - promoters50/4772382
ccatataaa

SEQ ID NO: 192779 - DNA, 9 bp, Unknown
  misc_feature (1)..( 9): Result.006 file - promoters50/4772382
ccttttaaa

SEQ ID NO: 192780 - DNA, 9 bp, Unknown
  misc_feature (1)..( 9): Result.006 file - promoters50/4772382
ctatatata

SEQ ID NO: 192781 - DNA, 9 bp, Unknown
  misc_feature (1)..( 9): Result.006 file - promoters50/4772382
gtatatata

SEQ ID NO: 192782 - DNA, 10 bp, Unknown
  misc_feature (1)..( 10): Result.006 file - promoters50/4772382
caaatctaac

SEQ ID NO: 192783 - DNA, 10 bp, Unknown
  misc_feature (1)..( 10): Result.006 file - promoters50/4772382
aacatctaaa

SEQ ID NO: 192784 - DNA, 10 bp, Unknown
  misc_feature (1)..( 10): Result.006 file - promoters50/4772382
gaaatctatt

SEQ ID NO: 192785 - DNA, 10 bp, Unknown
  misc_feature (1)..( 10): Result.006 file - promoters50/4772382
gaaatcccat

SEQ ID NO: 192786 - DNA, 10 bp, Unknown
  misc_feature (1)..( 10): Result.006 file - promoters50/4772382
gtcatataat

SEQ ID NO: 192787 - DNA, 10 bp, Unknown
  misc_feature (1)..( 10): Result.006 file - promoters50/4772382
gacgtataat

SEQ ID NO: 192788 - DNA, 10 bp, Unknown
  misc_feature (1)..( 10): Result.006 file - promoters50/4772382
tatataaaga

SEQ ID NO: 192789 - DNA, 10 bp, Unknown
  misc_feature (1)..( 10): Result.006 file - promoters50/4772382
tatatatatt

SEQ ID NO: 192790 - DNA, 10 bp, Unknown
  misc_feature (1)..( 10): Result.006 file - promoters50/4772382
tatatatata

SEQ ID NO: 192791 - DNA, 10 bp, Unknown
  misc_feature (1)..( 10): Result.006 file - promoters50/4772382
tatttaagaa

SEQ ID NO: 192792 - DNA, 10 bp, Unknown
  misc_feature (1)..( 10): Result.006 file - promoters50/4772382
catataaata

SEQ ID NO: 192793 - DNA, 10 bp, Unknown
  misc_feature (1)..( 10): Result.006 file - promoters50/4772389
cttataaata

SEQ ID NO: 192794 - DNA, 11 bp, Unknown
  misc_feature (1)..( 11): Result.006 file - promoters50/4772389
gcaaagattac

SEQ ID NO: 192795 - DNA, 11 bp, Unknown
  misc_feature (1)..( 11): Result.006 file - promoters50/4772389
ttaaaaattaa

SEQ ID NO: 192796 - DNA, 11 bp, Unknown
  misc_feature (1)..( 11): Result.006 file - promoters50/4772389
gcaaaaattat

SEQ ID NO: 192797 - DNA, 11 bp, Unknown
  misc_feature (1)..( 11): Result.006 file - promoters50/4772389
aataaagttaa

SEQ ID NO: 192798 - DNA, 11 bp, Unknown
  misc_feature (1)..( 11): Result.006 file - promoters50/4772389
cgtaaaatttt

SEQ ID NO: 192799 - DNA, 11 bp, Unknown
  misc_feature (1)..( 11): Result.006 file - promoters50/4772389
tcaaaaaactt

SEQ ID NO: 192800 - DNA, 11 bp, Unknown
  misc_feature (1)..( 11): Result.006 file - promoters50/4772389
tggaaacttta

SEQ ID NO: 192801 - DNA, 10 bp, Unknown
  misc_feature (1)..( 10): Result.006 file - promoters50/4772389
aaatattaat

SEQ ID NO: 192802 - DNA, 10 bp, Unknown
  misc_feature (1)..( 10): Result.006 file - promoters50/4772389
taatatttag

SEQ ID NO: 192803 - DNA, 10 bp, Unknown
  misc_feature (1)..( 10): Result.006 file - promoters50/4772389
aaatataagt

SEQ ID NO: 192804 - DNA, 10 bp, Unknown
  misc_feature (1)..( 10): Result.006 file - promoters50/4772389
aaatatgtta

SEQ ID NO: 192805 - DNA, 10 bp, Unknown
  misc_feature (1)..( 10): Result.006 file - promoters50/4772389
gaatttttag

SEQ ID NO: 192806 - DNA, 10 bp, Unknown
  misc_feature (1)..( 10): Result.006 file - promoters50/4772389
ctttattata

SEQ ID NO: 192807 - DNA, 10 bp, Unknown
  misc_feature (1)..( 10): Result.006 file - promoters50/4772389
tattttttta

SEQ ID NO: 192808 - DNA, 12 bp, Unknown
  misc_feature (1)..( 12): Result.006 file - promoters50/4772389
taattaaattaa

SEQ ID NO: 192809 - DNA, 12 bp, Unknown
  misc_feature (1)..( 12): Result.006 file - promoters50/4772389
caataaaattaa

SEQ ID NO: 192810 - DNA, 12 bp, Unknown
  misc_feature (1)..( 12): Result.006 file - promoters50/4772389
tgattaaatatg

SEQ ID NO: 192811 - DNA, 12 bp, Unknown
  misc_feature (1)..( 12): Result.006 file - promoters50/4772389
aaataaagtaat

SEQ ID NO: 192812 - DNA, 12 bp, Unknown
  misc_feature (1)..( 12): Result.006 file - promoters50/4772389
tttttaaattag

SEQ ID NO: 192813 - DNA, 12 bp, Unknown
  misc_feature (1)..( 12): Result.006 file - promoters50/4772389
caaaaaacttta

SEQ ID NO: 192814 - DNA, 12 bp, Unknown
  misc_feature (1)..( 12): Result.006 file - promoters50/4772389
caaaaattatta

SEQ ID NO: 192815 - DNA, 12 bp, Unknown
  misc_feature (1)..( 12): Result.006 file - promoters50/4772389
ataaaaagtttt

SEQ ID NO: 192816 - DNA, 12 bp, Unknown
  misc_feature (1)..( 12): Result.006 file - promoters50/4772389
taatagagtttt

SEQ ID NO: 192817 - DNA, 12 bp, Unknown
  misc_feature (1)..( 12): Result.006 file - promoters50/4772389
acaaaaactttt

SEQ ID NO: 192818 - DNA, 12 bp, Unknown
  misc_feature (1)..( 12): Result.006 file - promoters50/4772389
gttgaaaattta

SEQ ID NO: 192819 - DNA, 12 bp, Unknown
  misc_feature (1)..( 12): Result.006 file - promoters50/4772389
acaaaaataaac

SEQ ID NO: 192820 - DNA, 12 bp, Unknown
  misc_feature (1)..( 12): Result.006 file - promoters50/4772389
acaaaaagtgaa

SEQ ID NO: 192821 - DNA, 10 bp, Unknown
  misc_feature (1)..( 10): Result.006 file - promoters50/4772389
gaaaaacaaa

SEQ ID NO: 192822 - DNA, 10 bp, Unknown
  misc_feature (1)..( 10): Result.006 file - promoters50/4772389
gctcaacaaa

SEQ ID NO: 192823 - DNA, 10 bp, Unknown
  misc_feature (1)..( 10): Result.006 file - promoters50/4772389
gaaaaagaaa

SEQ ID NO: 192824 - DNA, 10 bp, Unknown
  misc_feature (1)..( 10): Result.006 file - promoters50/4772389
ataaaggaaa

SEQ ID NO: 192825 - DNA, 10 bp, Unknown
  misc_feature (1)..( 10): Result.006 file - promoters50/4772389
aaaaaagaag

SEQ ID NO: 192826 - DNA, 10 bp, Unknown
  misc_feature (1)..( 10): Result.006 file - promoters50/4772389
taatgacaaa

SEQ ID NO: 192827 - DNA, 11 bp, Unknown
  misc_feature (1)..( 11): Result.006 file - promoters50/4772389
aaaatttatcc

SEQ ID NO: 192828 - DNA, 11 bp, Unknown
  misc_feature (1)..( 11): Result.006 file - promoters50/4772389
taaattttgag

SEQ ID NO: 192829 - DNA, 11 bp, Unknown
  misc_feature (1)..( 11): Result.006 file - promoters50/4772389
aaagtttattg

SEQ ID NO: 192830 - DNA, 11 bp, Unknown
  misc_feature (1)..( 11): Result.006 file - promoters50/4772389
aaagtttatta

SEQ ID NO: 192831 - DNA, 11 bp, Unknown
  misc_feature (1)..( 11): Result.006 file - promoters50/4772389
aaaatttttgt

SEQ ID NO: 192832 - DNA, 11 bp, Unknown
  misc_feature (1)..( 11): Result.006 file - promoters50/4772389
attctttttta

SEQ ID NO: 192833 - DNA, 12 bp, Unknown
  misc_feature (1)..( 12): Result.006 file - promoters50/4772389
ttaagaacttta

SEQ ID NO: 192834 - DNA, 12 bp, Unknown
  misc_feature (1)..( 12): Result.006 file - promoters50/4772389
aagttaactttg

SEQ ID NO: 192835 - DNA, 12 bp, Unknown
  misc_feature (1)..( 12): Result.006 file - promoters50/4772389
tgttgaattttt

SEQ ID NO: 192836 - DNA, 12 bp, Unknown
  misc_feature (1)..( 12): Result.006 file - promoters50/4772389
ctggaaacttta

SEQ ID NO: 192837 - DNA, 12 bp, Unknown
  misc_feature (1)..( 12): Result.006 file - promoters50/4772389
ttaagatcttgt

SEQ ID NO: 192838 - DNA, 12 bp, Unknown
  misc_feature (1)..( 12): Result.006 file - promoters50/4772389
tgttgagtttcg

SEQ ID NO: 192839 - DNA, 11 bp, Unknown
  misc_feature (1)..( 11): Result.006 file - promoters50/4772389
atattaataat

SEQ ID NO: 192840 - DNA, 11 bp, Unknown
  misc_feature (1)..( 11): Result.006 file - promoters50/4772389
aaagtaataat

SEQ ID NO: 192841 - DNA, 11 bp, Unknown
  misc_feature (1)..( 11): Result.006 file - promoters50/4772389
aaattaatatt

SEQ ID NO: 192842 - DNA, 11 bp, Unknown
  misc_feature (1)..( 11): Result.006 file - promoters50/4772389
aaattagagtt

SEQ ID NO: 192843 - DNA, 11 bp, Unknown
  misc_feature (1)..( 11): Result.006 file - promoters50/4772389
actttattata

SEQ ID NO: 192844 - DNA, 11 bp, Unknown
  misc_feature (1)..( 11): Result.006 file - promoters50/4772389
ggagtactaat

SEQ ID NO: 192845 - DNA, 11 bp, Unknown
  misc_feature (1)..( 11): Result.006 file - promoters50/4772389
aatttattgtt

SEQ ID NO: 192846 - DNA, 11 bp, Unknown
  misc_feature (1)..( 11): Result.006 file - promoters50/4772389
gttaaaaaata

SEQ ID NO: 192847 - DNA, 11 bp, Unknown
  misc_feature (1)..( 11): Result.006 file - promoters50/4772389
attaacaaact

SEQ ID NO: 192848 - DNA, 11 bp, Unknown
  misc_feature (1)..( 11): Result.006 file - promoters50/4772389
aagaaaatata

SEQ ID NO: 192849 - DNA, 11 bp, Unknown
  misc_feature (1)..( 11): Result.006 file - promoters50/4772389
tttaaaatcgt

SEQ ID NO: 192850 - DNA, 11 bp, Unknown
  misc_feature (1)..( 11): Result.006 file - promoters50/4772389
gttaaaccaaa

SEQ ID NO: 192851 - DNA, 11 bp, Unknown
  misc_feature (1)..( 11): Result.006 file - promoters50/4772389
aatagagaatt

SEQ ID NO: 192852 - DNA, 9 bp, Unknown
  misc_feature (1)..( 9): Result.006 file - promoters50/4772389
acaaaaaaa

SEQ ID NO: 192853 - DNA, 9 bp, Unknown
  misc_feature (1)..( 9): Result.006 file - promoters50/4772389
taaaaaaaa

SEQ ID NO: 192854 - DNA, 9 bp, Unknown
  misc_feature (1)..( 9): Result.006 file - promoters50/4772389
aaaaataaa

SEQ ID NO: 192855 - DNA, 9 bp, Unknown
  misc_feature (1)..( 9): Result.006 file - promoters50/4772389
acaaaaaag

SEQ ID NO: 192856 - DNA, 9 bp, Unknown
  misc_feature (1)..( 9): Result.006 file - promoters50/4772389
acaaataaa

SEQ ID NO: 192857 - DNA, 9 bp, Unknown
  misc_feature (1)..( 9): Result.006 file - promoters50/4772389
gtaaataat

SEQ ID NO: 192858 - DNA, 9 bp, Unknown
  misc_feature (1)..( 9): Result.006 file - promoters50/4772398
ttaaacata

SEQ ID NO: 192859 - DNA, 12 bp, Unknown
  misc_feature (1)..( 12): Result.006 file - promoters50/4772398
aagaattttttt

SEQ ID NO: 192860 - DNA, 12 bp, Unknown
  misc_feature (1)..( 12): Result.006 file - promoters50/4772398
tataattttata

SEQ ID NO: 192861 - DNA, 12 bp, Unknown
  misc_feature (1)..( 12): Result.006 file - promoters50/4772398
aagactttggct

SEQ ID NO: 192862 - DNA, 12 bp, Unknown
  misc_feature (1)..( 12): Result.006 file - promoters50/4772398
tccaatttattt

SEQ ID NO: 192863 - DNA, 12 bp, Unknown
  misc_feature (1)..( 12): Result.006 file - promoters50/4772398
cctaagtttaag

SEQ ID NO: 192864 - DNA, 12 bp, Unknown
  misc_feature (1)..( 12): Result.006 file - promoters50/4772402
taaaagtttgtt

SEQ ID NO: 192865 - DNA, 14 bp, Unknown
  misc_feature (1)..( 14): Result.006 file - promoters50/4772402
atgtataaaatcga

SEQ ID NO: 192866 - DNA, 14 bp, Unknown
  misc_feature (1)..( 14): Result.006 file - promoters50/4772402
cactataaacaaac

SEQ ID NO: 192867 - DNA, 14 bp, Unknown
  misc_feature (1)..( 14): Result.006 file - promoters50/4772402
atgtataaaaacac

SEQ ID NO: 192868 - DNA, 14 bp, Unknown
  misc_feature (1)..( 14): Result.006 file - promoters50/4772402
ctttatatacacat

SEQ ID NO: 192869 - DNA, 14 bp, Unknown
  misc_feature (1)..( 14): Result.006 file - promoters50/4772402
ttgaataaacaaac

SEQ ID NO: 192870 - DNA, 14 bp, Unknown
  misc_feature (1)..( 14): Result.006 file - promoters50/4772410
tcttataaataatc

SEQ ID NO: 192871 - DNA, 12 bp, Unknown
  misc_feature (1)..( 12): Result.006 file - promoters50/4772410
tatttttgattc

SEQ ID NO: 192872 - DNA, 12 bp, Unknown
  misc_feature (1)..( 12): Result.006 file - promoters50/4772410
cgaatttgattt

SEQ ID NO: 192873 - DNA, 12 bp, Unknown
  misc_feature (1)..( 12): Result.006 file - promoters50/4772410
cattcatgattc

SEQ ID NO: 192874 - DNA, 12 bp, Unknown
  misc_feature (1)..( 12): Result.006 file - promoters50/4772410
tatgtttgatac

SEQ ID NO: 192875 - DNA, 12 bp, Unknown
  misc_feature (1)..( 12): Result.006 file - promoters50/4772410
tacacctgattc

SEQ ID NO: 192876 - DNA, 12 bp, Unknown
  misc_feature (1)..( 12): Result.006 file - promoters50/4772410
ttgttttgaatg

SEQ ID NO: 192877 - DNA, 12 bp, Unknown
  misc_feature (1)..( 12): Result.006 file - promoters50/4772410
aatggttggttg

SEQ ID NO: 192878 - DNA, 10 bp, Unknown
  misc_feature (1)..( 10): Result.006 file - promoters50/4772410
tatttttgat

SEQ ID NO: 192879 - DNA, 10 bp, Unknown
  misc_feature (1)..( 10): Result.006 file - promoters50/4772410
tatatttgtg

SEQ ID NO: 192880 - DNA, 10 bp, Unknown
  misc_feature (1)..( 10): Result.006 file - promoters50/4772410
tatgtttgat

SEQ ID NO: 192881 - DNA, 10 bp, Unknown
  misc_feature (1)..( 10): Result.006 file - promoters50/4772410
tctgtttggt

SEQ ID NO: 192882 - DNA, 10 bp, Unknown
  misc_feature (1)..( 10): Result.006 file - promoters50/4772410
ttgttttgaa

SEQ ID NO: 192883 - DNA, 10 bp, Unknown
  misc_feature (1)..( 10): Result.006 file - promoters50/4772410
ttcatttgta

SEQ ID NO: 192884 - DNA, 10 bp, Unknown
  misc_feature (1)..( 10): Result.006 file - promoters50/4772410
catgttttcc

SEQ ID NO: 192885 - DNA, 11 bp, Unknown
  misc_feature (1)..( 11): Result.006 file - promoters50/4772410
caatacacaaa

SEQ ID NO: 192886 - DNA, 11 bp, Unknown
  misc_feature (1)..( 11): Result.006 file - promoters50/4772410
caaaacacgag

SEQ ID NO: 192887 - DNA, 11 bp, Unknown
  misc_feature (1)..( 11): Result.006 file - promoters50/4772410
ttatacgcaaa

SEQ ID NO: 192888 - DNA, 11 bp, Unknown
  misc_feature (1)..( 11): Result.006 file - promoters50/4772410
atttacacaca

SEQ ID NO: 192889 - DNA, 11 bp, Unknown
  misc_feature (1)..( 11): Result.006 file - promoters50/4772410
gaaaacaaatc

SEQ ID NO: 192890 - DNA, 11 bp, Unknown
  misc_feature (1)..( 11): Result.006 file - promoters50/4772410
taaaaccaagc

SEQ ID NO: 192891 - DNA, 8 bp, Unknown
  misc_feature (1)..( 8): Result.006 file - promoters50/4772410
aaaataaa

SEQ ID NO: 192892 - DNA, 8 bp, Unknown
  misc_feature (1)..( 8): Result.006 file - promoters50/4772410
caaataac

SEQ ID NO: 192893 - DNA, 8 bp, Unknown
  misc_feature (1)..( 8): Result.006 file - promoters50/4772410
aaaacaaa

SEQ ID NO: 192894 - DNA, 8 bp, Unknown
  misc_feature (1)..( 8): Result.006 file - promoters50/4772410
aaaataag

SEQ ID NO: 192895 - DNA, 8 bp, Unknown
  misc_feature (1)..( 8): Result.006 file - promoters50/4772410
aaaacacg

SEQ ID NO: 192896 - DNA, 8 bp, Unknown
  misc_feature (1)..( 8): Result.006 file - promoters50/4772413
aaaccaag

SEQ ID NO: 192897 - DNA, 13 bp, Unknown
  misc_feature (1)..( 13): Result.006 file - promoters50/4772413
taaaaattttgtt

SEQ ID NO: 192898 - DNA, 13 bp, Unknown
  misc_feature (1)..( 13): Result.006 file - promoters50/4772413
gaaagatttgtgg

SEQ ID NO: 192899 - DNA, 13 bp, Unknown
  misc_feature (1)..( 13): Result.006 file - promoters50/4772413
caacaattttgtt

SEQ ID NO: 192900 - DNA, 13 bp, Unknown
  misc_feature (1)..( 13): Result.006 file - promoters50/4772413
gaaggatcagtaa

SEQ ID NO: 192901 - DNA, 10 bp, Unknown
  misc_feature (1)..( 10): Result.006 file - promoters50/4772413
ttaataaatt

SEQ ID NO: 192902 - DNA, 10 bp, Unknown
  misc_feature (1)..( 10): Result.006 file - promoters50/4772413
ttattaaatt

SEQ ID NO: 192903 - DNA, 10 bp, Unknown
  misc_feature (1)..( 10): Result.006 file - promoters50/4772413
ttatgaatct

SEQ ID NO: 192904 - DNA, 10 bp, Unknown
  misc_feature (1)..( 10): Result.006 file - promoters50/4772420
aaaatcaatc

SEQ ID NO: 192905 - DNA, 9 bp, Unknown
  misc_feature (1)..( 9): Result.006 file - promoters50/4772420
ctaatgaac

SEQ ID NO: 192906 - DNA, 9 bp, Unknown
  misc_feature (1)..( 9): Result.006 file - promoters50/4772420
agaatcaac

SEQ ID NO: 192907 - DNA, 9 bp, Unknown
  misc_feature (1)..( 9): Result.006 file - promoters50/4772472
agagtcatc

SEQ ID NO: 192908 - DNA, 9 bp, Unknown
  misc_feature (1)..( 9): Result.006 file - promoters50/4772472
gctgaaaaa

SEQ ID NO: 192909 - DNA, 9 bp, Unknown
  misc_feature (1)..( 9): Result.006 file - promoters50/4772472
ttagaaaaa

SEQ ID NO: 192910 - DNA, 9 bp, Unknown
  misc_feature (1)..( 9): Result.006 file - promoters50/4772472
tatgaaaac

SEQ ID NO: 192911 - DNA, 9 bp, Unknown
  misc_feature (1)..( 9): Result.006 file - promoters50/4772472
tttacaaaa

SEQ ID NO: 192912 - DNA, 9 bp, Unknown
  misc_feature (1)..( 9): Result.006 file - promoters50/4772472
atacactta

SEQ ID NO: 192913 - DNA, 9 bp, Unknown
  misc_feature (1)..( 9): Result.006 file - promoters50/4772472
gtacacttt

SEQ ID NO: 192914 - DNA, 9 bp, Unknown
  misc_feature (1)..( 9): Result.006 file - promoters50/4772472
gtacatttt

SEQ ID NO: 192915 - DNA, 10 bp, Unknown
  misc_feature (1)..( 10): Result.006 file - promoters50/4772472
atgaagatca

SEQ ID NO: 192916 - DNA, 10 bp, Unknown
  misc_feature (1)..( 10): Result.006 file - promoters50/4772472
caaaagatct

SEQ ID NO: 192917 - DNA, 10 bp, Unknown
  misc_feature (1)..( 10): Result.006 file - promoters50/4772472
cacaagatca

SEQ ID NO: 192918 - DNA, 10 bp, Unknown
  misc_feature (1)..( 10): Result.006 file - promoters50/4772472
cactagatat

SEQ ID NO: 192919 - DNA, 9 bp, Unknown
  misc_feature (1)..( 9): Result.006 file - promoters50/4772472
aaaacaaaa

SEQ ID NO: 192920 - DNA, 9 bp, Unknown
  misc_feature (1)..( 9): Result.006 file - promoters50/4772472
gaaacaaaa

SEQ ID NO: 192921 - DNA, 10 bp, Unknown
  misc_feature (1)..( 10): Result.006 file - promoters50/4772472
aaaatcaact

SEQ ID NO: 192922 - DNA, 8 bp, Unknown
  misc_feature (1)..( 8): Result.006 file - promoters50/4772472
aaagtaaa

SEQ ID NO: 192923 - DNA, 8 bp, Unknown
  misc_feature (1)..( 8): Result.006 file - promoters50/4772472
aaactaaa

SEQ ID NO: 192924 - DNA, 8 bp, Unknown
  misc_feature (1)..( 8): Result.006 file - promoters50/4772472
aaaataac

SEQ ID NO: 192925 - DNA, 8 bp, Unknown
  misc_feature (1)..( 8): Result.006 file - promoters50/4772472
tacaagag

SEQ ID NO: 192926 - DNA, 8 bp, Unknown
  misc_feature (1)..( 8): Result.006 file - promoters50/4772472
cacaagat

SEQ ID NO: 192927 - DNA, 8 bp, Unknown
  misc_feature (1)..( 8): Result.006 file - promoters50/4772472
cactagat

SEQ ID NO: 192928 - DNA, 7 bp, Unknown
  misc_feature (1)..( 7): Result.006 file - promoters50/4772472
aaaatta

SEQ ID NO: 192929 - DNA, 7 bp, Unknown
  misc_feature (1)..( 7): Result.006 file - promoters50/4772472
caaatta

SEQ ID NO: 192930 - DNA, 7 bp, Unknown
  misc_feature (1)..( 7): Result.006 file - promoters50/4772472
caaatta

SEQ ID NO: 192931 - DNA, 9 bp, Unknown
  misc_feature (1)..( 9): Result.006 file - promoters50/4772472
attttgtag

SEQ ID NO: 192932 - DNA, 9 bp, Unknown
  misc_feature (1)..( 9): Result.006 file - promoters50/4772472
attttgtac

SEQ ID NO: 192933 - DNA, 9 bp, Unknown
  misc_feature (1)..( 9): Result.006 file - promoters50/4772472
gctttctag

SEQ ID NO: 192934 - DNA, 8 bp, Unknown
  misc_feature (1)..( 8): Result.006 file - promoters50/4772472
atcttaag

SEQ ID NO: 192935 - DNA, 8 bp, Unknown
  misc_feature (1)..( 8): Result.006 file - promoters50/4772472
atcttaca

SEQ ID NO: 192936 - DNA, 8 bp, Unknown
  misc_feature (1)..( 8): Result.006 file - promoters50/4772472
ctctaaca

SEQ ID NO: 192937 - DNA, 10 bp, Unknown
  misc_feature (1)..( 10): Result.006 file - promoters50/4772472
ttatttaaaa

SEQ ID NO: 192938 - DNA, 10 bp, Unknown
  misc_feature (1)..( 10): Result.006 file - promoters50/4772472
ttagttacag

SEQ ID NO: 192939 - DNA, 10 bp, Unknown
  misc_feature (1)..( 10): Result.006 file - promoters50/4772700
acatttaaaa

SEQ ID NO: 192940 - DNA, 15 bp, Unknown
  misc_feature (1)..( 15): Result.006 file - promoters50/4772700
gccgttcttattgtt

SEQ ID NO: 192941 - DNA, 15 bp, Unknown
  misc_feature (1)..( 15): Result.006 file - promoters50/4772700
tccattcttattttg

SEQ ID NO: 192942 - DNA, 15 bp, Unknown
  misc_feature (1)..( 15): Result.006 file - promoters50/4772700
tccactcttttccta

SEQ ID NO: 192943 - DNA, 15 bp, Unknown
  misc_feature (1)..( 15): Result.006 file - promoters50/4772700
acatcttttatttta

SEQ ID NO: 192944 - DNA, 15 bp, Unknown
  misc_feature (1)..( 15): Result.006 file - promoters50/4772700
cgttggcttctattt

SEQ ID NO: 192945 - DNA, 15 bp, Unknown
  misc_feature (1)..( 15): Result.006 file - promoters50/4772710
aattagtatattttc

SEQ ID NO: 192946 - DNA, 10 bp, Unknown
  misc_feature (1)..( 10): Result.006 file - promoters50/4772710
tattttgctt

SEQ ID NO: 192947 - DNA, 10 bp, Unknown
  misc_feature (1)..( 10): Result.006 file - promoters50/4772710
gcgttttctt

SEQ ID NO: 192948 - DNA, 10 bp, Unknown
  misc_feature (1)..( 10): Result.006 file - promoters50/4772710
ttctttgctc

SEQ ID NO: 192949 - DNA, 10 bp, Unknown
  misc_feature (1)..( 10): Result.006 file - promoters50/4772710
tatgttgcaa

SEQ ID NO: 192950 - DNA, 10 bp, Unknown
  misc_feature (1)..( 10): Result.006 file - promoters50/4772710
tatattgagg

SEQ ID NO: 192951 - DNA, 9 bp, Unknown
  misc_feature (1)..( 9): Result.006 file - promoters50/4772710
ttattttgc

SEQ ID NO: 192952 - DNA, 9 bp, Unknown
  misc_feature (1)..( 9): Result.006 file - promoters50/4772710
ttaatttat

SEQ ID NO: 192953 - DNA, 9 bp, Unknown
  misc_feature (1)..( 9): Result.006 file - promoters50/4772710
gtatattga

SEQ ID NO: 192954 - DNA, 9 bp, Unknown
  misc_feature (1)..( 9): Result.006 file - promoters50/4772710
ctatgttgc

SEQ ID NO: 192955 - DNA, 8 bp, Unknown
  misc_feature (1)..( 8): Result.006 file - promoters50/4772710
taataaaa

SEQ ID NO: 192956 - DNA, 8 bp, Unknown
  misc_feature (1)..( 8): Result.006 file - promoters50/4772710
gaatcaaa

SEQ ID NO: 192957 - DNA, 8 bp, Unknown
  misc_feature (1)..( 8): Result.006 file - promoters50/4772710
gaatcaca

SEQ ID NO: 192958 - DNA, 8 bp, Unknown
  misc_feature (1)..( 8): Result.006 file - promoters50/4772720
gaagcacc

SEQ ID NO: 192959 - DNA, 8 bp, Unknown
  misc_feature (1)..( 8): Result.006 file - promoters50/4772720
aattaaac

SEQ ID NO: 192960 - DNA, 8 bp, Unknown
  misc_feature (1)..( 8): Result.006 file - promoters50/4772720
aattaatg

SEQ ID NO: 192961 - DNA, 8 bp, Unknown
  misc_feature (1)..( 8): Result.006 file - promoters50/4772720
aattgatg

SEQ ID NO: 192962 - DNA, 7 bp, Unknown
  misc_feature (1)..( 7): Result.006 file - promoters50/4772720
gaatcag

SEQ ID NO: 192963 - DNA, 7 bp, Unknown
  misc_feature (1)..( 7): Result.006 file - promoters50/4772720
gaatcaa

SEQ ID NO: 192964 - DNA, 7 bp, Unknown
  misc_feature (1)..( 7): Result.006 file - promoters50/4772720
gaaacaa

SEQ ID NO: 192965 - DNA, 7 bp, Unknown
  misc_feature (1)..( 7): Result.006 file - promoters50/4772720
aaaacaa

SEQ ID NO: 192966 - DNA, 7 bp, Unknown
  misc_feature (1)..( 7): Result.006 file - promoters50/4772720
gaaacaa

SEQ ID NO: 192967 - DNA, 7 bp, Unknown
  misc_feature (1)..( 7): Result.006 file - promoters50/4772724
gaatcaa

SEQ ID NO: 192968 - DNA, 7 bp, Unknown
  misc_feature (1)..( 7): Result.006 file - promoters50/4772724
atgtgga

SEQ ID NO: 192969 - DNA, 7 bp, Unknown
  misc_feature (1)..( 7): Result.006 file - promoters50/4772724
atgagga

SEQ ID NO: 192970 - DNA, 7 bp, Unknown
  misc_feature (1)..( 7): Result.006 file - promoters50/4772735
atgtggt

SEQ ID NO: 192971 - DNA, 10 bp, Unknown
  misc_feature (1)..( 10): Result.006 file - promoters50/4772735
tctttgtaat

SEQ ID NO: 192972 - DNA, 10 bp, Unknown
  misc_feature (1)..( 10): Result.006 file - promoters50/4772735
tctttttaaa

SEQ ID NO: 192973 - DNA, 10 bp, Unknown
  misc_feature (1)..( 10): Result.006 file - promoters50/4772735
aaattgtaat

SEQ ID NO: 192974 - DNA, 8 bp, Unknown
  misc_feature (1)..( 8): Result.006 file - promoters50/4772735
aatcataa

SEQ ID NO: 192975 - DNA, 8 bp, Unknown
  misc_feature (1)..( 8): Result.006 file - promoters50/4772735
aatcattt

SEQ ID NO: 192976 - DNA, 8 bp, Unknown
  misc_feature (1)..( 8): Result.006 file - promoters50/4772735
catcataa

SEQ ID NO: 192977 - DNA, 9 bp, Unknown
  misc_feature (1)..( 9): Result.006 file - promoters50/4772735
attttatct

SEQ ID NO: 192978 - DNA, 9 bp, Unknown
  misc_feature (1)..( 9): Result.006 file - promoters50/4772735
tctttttct

SEQ ID NO: 192979 - DNA, 9 bp, Unknown
  misc_feature (1)..( 9): Result.006 file - promoters50/4772735
tatttatgt

SEQ ID NO: 192980 - DNA, 7 bp, Unknown
  misc_feature (1)..( 7): Result.006 file - promoters50/4772735
taaatcg

SEQ ID NO: 192981 - DNA, 7 bp, Unknown
  misc_feature (1)..( 7): Result.006 file - promoters50/4772735
taaatca

SEQ ID NO: 192982 - DNA, 7 bp, Unknown
  misc_feature (1)..( 7): Result.006 file - promoters50/4772743
taattca

SEQ ID NO: 192983 - DNA, 7 bp, Unknown
  misc_feature (1)..( 7): Result.006 file - promoters50/4772743
aattttt

SEQ ID NO: 192984 - DNA, 7 bp, Unknown
  misc_feature (1)..( 7): Result.006 file - promoters50/4772743
tattttt

SEQ ID NO: 192985 - DNA, 7 bp, Unknown
  misc_feature (1)..( 7): Result.006 file - promoters50/4772743
gattttt

SEQ ID NO: 192986 - DNA, 7 bp, Unknown
  misc_feature (1)..( 7): Result.006 file - promoters50/4772743
aatttta

SEQ ID NO: 192987 - DNA, 8 bp, Unknown
  misc_feature (1)..( 8): Result.006 file - promoters50/4772743
aaaaatcg

SEQ ID NO: 192988 - DNA, 8 bp, Unknown
  misc_feature (1)..( 8): Result.006 file - promoters50/4772743
aaaaataa

SEQ ID NO: 192989 - DNA, 9 bp, Unknown
  misc_feature (1)..( 9): Result.006 file - promoters50/4772743
aaacaatct

SEQ ID NO: 192990 - DNA, 9 bp, Unknown
  misc_feature (1)..( 9): Result.006 file - promoters50/4772751
gtaaaataa

SEQ ID NO: 192991 - DNA, 10 bp, Unknown
  misc_feature (1)..( 10): Result.006 file - promoters50/4772751
gtaacataaa

SEQ ID NO: 192992 - DNA, 10 bp, Unknown
  misc_feature (1)..( 10): Result.006 file - promoters50/4772751
ttaaaataaa

SEQ ID NO: 192993 - DNA, 10 bp, Unknown
  misc_feature (1)..( 10): Result.006 file - promoters50/4772772
ttaaaaaatt

SEQ ID NO: 192994 - DNA, 11 bp, Unknown
  misc_feature (1)..( 11): Result.006 file - promoters50/4772772
acctttataaa

SEQ ID NO: 192995 - DNA, 11 bp, Unknown
  misc_feature (1)..( 11): Result.006 file - promoters50/4772772
gcctatatata

SEQ ID NO: 192996 - DNA, 11 bp, Unknown
  misc_feature (1)..( 11): Result.006 file - promoters50/4772772
acctttataaa

SEQ ID NO: 192997 - DNA, 11 bp, Unknown
  misc_feature (1)..( 11): Result.006 file - promoters50/4772772
gtatatatact

SEQ ID NO: 192998 - DNA, 11 bp, Unknown
  misc_feature (1)..( 11): Result.006 file - promoters50/4772772
gtatatatact

SEQ ID NO: 192999 - DNA, 11 bp, Unknown
  misc_feature (1)..( 11): Result.006 file - promoters50/4772772
atatatataac

SEQ ID NO: 193000 - DNA, 8 bp, Unknown
  misc_feature (1)..( 8): Result.006 file - promoters50/4772772
tgataaaa

SEQ ID NO: 193001 - DNA, 8 bp, Unknown
  misc_feature (1)..( 8): Result.006 file - promoters50/4772772
tgacaaaa

SEQ ID NO: 193002 - DNA, 8 bp, Unknown
  misc_feature (1)..( 8): Result.006 file - promoters50/4772772
gtacaaaa

SEQ ID NO: 193003 - DNA, 8 bp, Unknown
  misc_feature (1)..( 8): Result.006 file - promoters50/4772772
acacaaaa

SEQ ID NO: 193004 - DNA, 8 bp, Unknown
  misc_feature (1)..( 8): Result.006 file - promoters50/4772772
caacaaaa

SEQ ID NO: 193005 - DNA, 8 bp, Unknown
  misc_feature (1)..( 8): Result.006 file - promoters50/4772772
taacaaat

SEQ ID NO: 193006 - DNA, 10 bp, Unknown
  misc_feature (1)..( 10): Result.006 file - promoters50/4772772
ttcttatttt

SEQ ID NO: 193007 - DNA, 10 bp, Unknown
  misc_feature (1)..( 10): Result.006 file - promoters50/4772772
cttttatttt

SEQ ID NO: 193008 - DNA, 10 bp, Unknown
  misc_feature (1)..( 10): Result.006 file - promoters50/4772772
ttcttattgt

SEQ ID NO: 193009 - DNA, 10 bp, Unknown
  misc_feature (1)..( 10): Result.006 file - promoters50/4772772
tttttatttt

SEQ ID NO: 193010 - DNA, 11 bp, Unknown
  misc_feature (1)..( 11): Result.006 file - promoters50/4772772
ggcttctattt

SEQ ID NO: 193011 - DNA, 11 bp, Unknown
  misc_feature (1)..( 11): Result.006 file - promoters50/4772772
actttattata

SEQ ID NO: 193012 - DNA, 12 bp, Unknown
  misc_feature (1)..( 12): Result.006 file - promoters50/4772772
aatgatattcgt

SEQ ID NO: 193013 - DNA, 12 bp, Unknown
  misc_feature (1)..( 12): Result.006 file - promoters50/4772772
aataatataact

SEQ ID NO: 193014 - DNA, 12 bp, Unknown
  misc_feature (1)..( 12): Result.006 file - promoters50/4772772
tttgatatatac

SEQ ID NO: 193015 - DNA, 12 bp, Unknown
  misc_feature (1)..( 12): Result.006 file - promoters50/4772772
aatgttattttt

SEQ ID NO: 193016 - DNA, 12 bp, Unknown
  misc_feature (1)..( 12): Result.006 file - promoters50/4772772
taaaatatacaa

SEQ ID NO: 193017 - DNA, 12 bp, Unknown
  misc_feature (1)..( 12): Result.006 file - promoters50/4772824
gtgaatttaact

SEQ ID NO: 193018 - DNA, 7 bp, Unknown
  misc_feature (1)..( 7): Result.006 file - promoters50/4772824
tatattc

SEQ ID NO: 193019 - DNA, 7 bp, Unknown
  misc_feature (1)..( 7): Result.006 file - promoters50/4772824
tattttc

SEQ ID NO: 193020 - DNA, 7 bp, Unknown
  misc_feature (1)..( 7): Result.006 file - promoters50/4772824
gattttc

SEQ ID NO: 193021 - DNA, 11 bp, Unknown
  misc_feature (1)..( 11): Result.006 file - promoters50/4772824
atatgaagttt

SEQ ID NO: 193022 - DNA, 11 bp, Unknown
  misc_feature (1)..( 11): Result.006 file - promoters50/4772824
ggatgatgttt

SEQ ID NO: 193023 - DNA, 11 bp, Unknown
  misc_feature (1)..( 11): Result.006 file - promoters50/4772835
ataagaaaaca

SEQ ID NO: 193024 - DNA, 8 bp, Unknown
  misc_feature (1)..( 8): Result.006 file - promoters50/4772835
ataaaaac

SEQ ID NO: 193025 - DNA, 8 bp, Unknown
  misc_feature (1)..( 8): Result.006 file - promoters50/4772835
atataaac

SEQ ID NO: 193026 - DNA, 8 bp, Unknown
  misc_feature (1)..( 8): Result.006 file - promoters50/4772843
ttaagaac

SEQ ID NO: 193027 - DNA, 12 bp, Unknown
  misc_feature (1)..( 12): Result.006 file - promoters50/4772843
tcttgtgttctt

SEQ ID NO: 193028 - DNA, 12 bp, Unknown
  misc_feature (1)..( 12): Result.006 file - promoters50/4772843
caacatgtgctt

SEQ ID NO: 193029 - DNA, 12 bp, Unknown
  misc_feature (1)..( 12): Result.006 file - promoters50/4772843
aattgtgttcta

SEQ ID NO: 193030 - DNA, 12 bp, Unknown
  misc_feature (1)..( 12): Result.006 file - promoters50/4772843
caaaatgtgctt

SEQ ID NO: 193031 - DNA, 7 bp, Unknown
  misc_feature (1)..( 7): Result.006 file - promoters50/4772843
aatcatg

SEQ ID NO: 193032 - DNA, 7 bp, Unknown
  misc_feature (1)..( 7): Result.006 file - promoters50/4772843
aatgatg

SEQ ID NO: 193033 - DNA, 7 bp, Unknown
  misc_feature (1)..( 7): Result.006 file - promoters50/4772853
aatcata

SEQ ID NO: 193034 - DNA, 8 bp, Unknown
  misc_feature (1)..( 8): Result.006 file - promoters50/4772853
aaattaat

SEQ ID NO: 193035 - DNA, 8 bp, Unknown
  misc_feature (1)..( 8): Result.006 file - promoters50/4772853
taattaag

SEQ ID NO: 193036 - DNA, 8 bp, Unknown
  misc_feature (1)..( 8): Result.006 file - promoters50/4772853
aaaataat

SEQ ID NO: 193037 - DNA, 11 bp, Unknown
  misc_feature (1)..( 11): Result.006 file - promoters50/4772853
agtcaactaat

SEQ ID NO: 193038 - DNA, 11 bp, Unknown
  misc_feature (1)..( 11): Result.006 file - promoters50/4772853
ttttaacaaat

SEQ ID NO: 193039 - DNA, 11 bp, Unknown
  misc_feature (1)..( 11): Result.006 file - promoters50/4772853
ttttcacaata

SEQ ID NO: 193040 - DNA, 10 bp, Unknown
  misc_feature (1)..( 10): Result.006 file - promoters50/4772853
taaaatgtta

SEQ ID NO: 193041 - DNA, 10 bp, Unknown
  misc_feature (1)..( 10): Result.006 file - promoters50/4772853
taaaatgttt

SEQ ID NO: 193042 - DNA, 10 bp, Unknown
  misc_feature (1)..( 10): Result.006 file - promoters50/4772853
taggatgttt

SEQ ID NO: 193043 - DNA, 13 bp, Unknown
  misc_feature (1)..( 13): Result.006 file - promoters50/4772853
tttatcgataaat

SEQ ID NO: 193044 - DNA, 13 bp, Unknown
  misc_feature (1)..( 13): Result.006 file - promoters50/4772853
ttcatcgaaaaat

SEQ ID NO: 193045 - DNA, 13 bp, Unknown
  misc_feature (1)..( 13): Result.006 file - promoters50/4772853
ttcattgaaaagc

SEQ ID NO: 193046 - DNA, 8 bp, Unknown
  misc_feature (1)..( 8): Result.006 file - promoters50/4772853
ccaacatt

SEQ ID NO: 193047 - DNA, 8 bp, Unknown
  misc_feature (1)..( 8): Result.006 file - promoters50/4772853
tcaaaatt

SEQ ID NO: 193048 - DNA, 8 bp, Unknown
  misc_feature (1)..( 8): Result.006 file - promoters50/4772853
tcaaaatc

SEQ ID NO: 193049 - DNA, 8 bp, Unknown
  misc_feature (1)..( 8): Result.006 file - promoters50/4772853
catatttt

SEQ ID NO: 193050 - DNA, 8 bp, Unknown
  misc_feature (1)..( 8): Result.006 file - promoters50/4772853
tctatttt

SEQ ID NO: 193051 - DNA, 8 bp, Unknown
  misc_feature (1)..( 8): Result.006 file - promoters50/4772853
tctattta

SEQ ID NO: 193052 - DNA, 10 bp, Unknown
  misc_feature (1)..( 10): Result.006 file - promoters50/4772853
taatttgaac

SEQ ID NO: 193053 - DNA, 10 bp, Unknown
  misc_feature (1)..( 10): Result.006 file - promoters50/4772853
taatttaaaa

SEQ ID NO: 193054 - DNA, 10 bp, Unknown
  misc_feature (1)..( 10): Result.006 file - promoters50/4772853
taattaaaaa

SEQ ID NO: 193055 - DNA, 10 bp, Unknown
  misc_feature (1)..( 10): Result.006 file - promoters50/4772853
catttaagtg

SEQ ID NO: 193056 - DNA, 10 bp, Unknown
  misc_feature (1)..( 10): Result.006 file - promoters50/4772853
aatttaaaat

SEQ ID NO: 193057 - DNA, 10 bp, Unknown
  misc_feature (1)..( 10): Result.006 file - promoters50/4772855
taattaaaaa

SEQ ID NO: 193058 - DNA, 9 bp, Unknown
  misc_feature (1)..( 9): Result.006 file - promoters50/4772855
caatatgtt

SEQ ID NO: 193059 - DNA, 9 bp, Unknown
  misc_feature (1)..( 9): Result.006 file - promoters50/4772855
caatatgtt

SEQ ID NO: 193060 - DNA, 9 bp, Unknown
  misc_feature (1)..( 9): Result.006 file - promoters50/4772855
caatataaa

SEQ ID NO: 193061 - DNA, 7 bp, Unknown
  misc_feature (1)..( 7): Result.006 file - promoters50/4772855
aaattta

SEQ ID NO: 193062 - DNA, 7 bp, Unknown
  misc_feature (1)..( 7): Result.006 file - promoters50/4772855
taattta

SEQ ID NO: 193063 - DNA, 7 bp, Unknown
  misc_feature (1)..( 7): Result.006 file - promoters50/4772855
aaatttt

SEQ ID NO: 193064 - DNA, 11 bp, Unknown
  misc_feature (1)..( 11): Result.006 file - promoters50/4772855
ctttaaataaa

SEQ ID NO: 193065 - DNA, 11 bp, Unknown
  misc_feature (1)..( 11): Result.006 file - promoters50/4772855
caaaaaataaa

SEQ ID NO: 193066 - DNA, 11 bp, Unknown
  misc_feature (1)..( 11): Result.006 file - promoters50/4772855
ttaaaaataca

SEQ ID NO: 193067 - DNA, 11 bp, Unknown
  misc_feature (1)..( 11): Result.006 file - promoters50/4772855
ttaaaaatcag

SEQ ID NO: 193068 - DNA, 8 bp, Unknown
  misc_feature (1)..( 8): Result.006 file - promoters50/4772855
cctagaaa

SEQ ID NO: 193069 - DNA, 8 bp, Unknown
  misc_feature (1)..( 8): Result.006 file - promoters50/4772855
cctataaa

SEQ ID NO: 193070 - DNA, 8 bp, Unknown
  misc_feature (1)..( 8): Result.006 file - promoters50/4772855
tttataaa

SEQ ID NO: 193071 - DNA, 9 bp, Unknown
  misc_feature (1)..( 9): Result.006 file - promoters50/4772855
tttaaataa

SEQ ID NO: 193072 - DNA, 9 bp, Unknown
  misc_feature (1)..( 9): Result.006 file - promoters50/4772855
tttaaaaat

SEQ ID NO: 193073 - DNA, 9 bp, Unknown
  misc_feature (1)..( 9): Result.006 file - promoters50/4772855
attaaaaat

SEQ ID NO: 193074 - DNA, 9 bp, Unknown
  misc_feature (1)..( 9): Result.006 file - promoters50/4772855
aattcgtgg

SEQ ID NO: 193075 - DNA, 9 bp, Unknown
  misc_feature (1)..( 9): Result.006 file - promoters50/4772855
aattcgttt

SEQ ID NO: 193076 - DNA, 9 bp, Unknown
  misc_feature (1)..( 9): Result.006 file - promoters50/4772855
gattcgttt

SEQ ID NO: 193077 - DNA, 9 bp, Unknown
  misc_feature (1)..( 9): Result.006 file - promoters50/4772855
ttttaagat

SEQ ID NO: 193078 - DNA, 9 bp, Unknown
  misc_feature (1)..( 9): Result.006 file - promoters50/4772855
atataagat

SEQ ID NO: 193079 - DNA, 9 bp, Unknown
  misc_feature (1)..( 9): Result.006 file - promoters50/4772855
atatcagaa

SEQ ID NO: 193080 - DNA, 12 bp, Unknown
  misc_feature (1)..( 12): Result.006 file - promoters50/4772855
aaaaacaaaaca

SEQ ID NO: 193081 - DNA, 12 bp, Unknown
  misc_feature (1)..( 12): Result.006 file - promoters50/4772855
aaacacaataca

SEQ ID NO: 193082 - DNA, 12 bp, Unknown
  misc_feature (1)..( 12): Result.006 file - promoters50/4772855
aaaaacaaaact

SEQ ID NO: 193083 - DNA, 7 bp, Unknown
  misc_feature (1)..( 7): Result.006 file - promoters50/4772855
aaaaata

SEQ ID NO: 193084 - DNA, 7 bp, Unknown
  misc_feature (1)..( 7): Result.006 file - promoters50/4772855
aaaaatc

SEQ ID NO: 193085 - DNA, 7 bp, Unknown
  misc_feature (1)..( 7): Result.006 file - promoters50/4772873
aaaaata

SEQ ID NO: 193086 - DNA, 6 bp, Unknown
  misc_feature (1)..( 6): Result.006 file - promoters50/4772873
aaaaga

SEQ ID NO: 193087 - DNA, 6 bp, Unknown
  misc_feature (1)..( 6): Result.006 file - promoters50/4772873
aaaaga

SEQ ID NO: 193088 - DNA, 6 bp, Unknown
  misc_feature (1)..( 6): Result.006 file - promoters50/4772873
aaaaga

SEQ ID NO: 193089 - DNA, 9 bp, Unknown
  misc_feature (1)..( 9): Result.006 file - promoters50/4772873
aaaaaaaaa

SEQ ID NO: 193090 - DNA, 9 bp, Unknown
  misc_feature (1)..( 9): Result.006 file - promoters50/4772873
aaataaaaa

SEQ ID NO: 193091 - DNA, 9 bp, Unknown
  misc_feature (1)..( 9): Result.006 file - promoters50/4772879
atataaaac

SEQ ID NO: 193092 - DNA, 10 bp, Unknown
  misc_feature (1)..( 10): Result.006 file - promoters50/4772879
tatttttttt

SEQ ID NO: 193093 - DNA, 10 bp, Unknown
  misc_feature (1)..( 10): Result.006 file - promoters50/4772879
catttttaag

SEQ ID NO: 193094 - DNA, 10 bp, Unknown
  misc_feature (1)..( 10): Result.006 file - promoters50/4772879
actttttttt

SEQ ID NO: 193095 - DNA, 10 bp, Unknown
  misc_feature (1)..( 10): Result.006 file - promoters50/4772879
gatttatttg

SEQ ID NO: 193096 - DNA, 10 bp, Unknown
  misc_feature (1)..( 10): Result.006 file - promoters50/4772879
aatttttcca

SEQ ID NO: 193097 - DNA, 10 bp, Unknown
  misc_feature (1)..( 10): Result.006 file - promoters50/4772879
aatctttaca

SEQ ID NO: 193098 - DNA, 12 bp, Unknown
  misc_feature (1)..( 12): Result.006 file - promoters50/4772879
atctcaaataac

SEQ ID NO: 193099 - DNA, 12 bp, Unknown
  misc_feature (1)..( 12): Result.006 file - promoters50/4772879
ataaaaaataaa

SEQ ID NO: 193100 - DNA, 12 bp, Unknown
  misc_feature (1)..( 12): Result.006 file - promoters50/4772879
ataataaatagg

SEQ ID NO: 193101 - DNA, 12 bp, Unknown
  misc_feature (1)..( 12): Result.006 file - promoters50/4772879
gcctaaaatata

SEQ ID NO: 193102 - DNA, 12 bp, Unknown
  misc_feature (1)..( 12): Result.006 file - promoters50/4772879
acaatgaatggc

SEQ ID NO: 193103 - DNA, 12 bp, Unknown
  misc_feature (1)..( 12): Result.006 file - promoters50/4772879
ccccaaaagaaa

SEQ ID NO: 193104 - DNA, 12 bp, Unknown
  misc_feature (1)..( 12): Result.006 file - promoters50/4772879
aatcagaataaa

SEQ ID NO: 193105 - DNA, 12 bp, Unknown
  misc_feature (1)..( 12): Result.006 file - promoters50/4772879
aattattatact

SEQ ID NO: 193106 - DNA, 9 bp, Unknown
  misc_feature (1)..( 9): Result.006 file - promoters50/4772879
tttattgat

SEQ ID NO: 193107 - DNA, 9 bp, Unknown
  misc_feature (1)..( 9): Result.006 file - promoters50/4772879
gttactgat

SEQ ID NO: 193108 - DNA, 9 bp, Unknown
  misc_feature (1)..( 9): Result.006 file - promoters50/4772879
tttgttggt

SEQ ID NO: 193109 - DNA, 9 bp, Unknown
  misc_feature (1)..( 9): Result.006 file - promoters50/4772879
tttgttggt

SEQ ID NO: 193110 - DNA, 9 bp, Unknown
  misc_feature (1)..( 9): Result.006 file - promoters50/4772879
cttaatgac

SEQ ID NO: 193111 - DNA, 9 bp, Unknown
  misc_feature (1)..( 9): Result.006 file - promoters50/4772879
aataatgaa

SEQ ID NO: 193112 - DNA, 9 bp, Unknown
  misc_feature (1)..( 9): Result.006 file - promoters50/4772879
gatttattt

SEQ ID NO: 193113 - DNA, 9 bp, Unknown
  misc_feature (1)..( 9): Result.006 file - promoters50/4772879
aatttatgt

SEQ ID NO: 193114 - DNA, 9 bp, Unknown
  misc_feature (1)..( 9): Result.006 file - promoters50/4772879
tgtttgttt

SEQ ID NO: 193115 - DNA, 9 bp, Unknown
  misc_feature (1)..( 9): Result.006 file - promoters50/4772879
tatttattt

SEQ ID NO: 193116 - DNA, 9 bp, Unknown
  misc_feature (1)..( 9): Result.006 file - promoters50/4772879
aatatatat

SEQ ID NO: 193117 - DNA, 9 bp, Unknown
  misc_feature (1)..( 9): Result.006 file - promoters50/4772879
aataaatat

SEQ ID NO: 193118 - DNA, 9 bp, Unknown
  misc_feature (1)..( 9): Result.006 file - promoters50/4772879
aatttattt

SEQ ID NO: 193119 - DNA, 9 bp, Unknown
  misc_feature (1)..( 9): Result.006 file - promoters50/4772879
gctttgttt

SEQ ID NO: 193120 - DNA, 9 bp, Unknown
  misc_feature (1)..( 9): Result.006 file - promoters50/4772879
aatatatat

SEQ ID NO: 193121 - DNA, 9 bp, Unknown
  misc_feature (1)..( 9): Result.006 file - promoters50/4772879
tatttattt

SEQ ID NO: 193122 - DNA, 9 bp, Unknown
  misc_feature (1)..( 9): Result.006 file - promoters50/4772879
catttgttt

SEQ ID NO: 193123 - DNA, 9 bp, Unknown
  misc_feature (1)..( 9): Result.006 file - promoters50/4772879
aataaatat

SEQ ID NO: 193124 - DNA, 12 bp, Unknown
  misc_feature (1)..( 12): Result.006 file - promoters50/4772879
ctgaatattaga

SEQ ID NO: 193125 - DNA, 12 bp, Unknown
  misc_feature (1)..( 12): Result.006 file - promoters50/4772879
atgaatattaga

SEQ ID NO: 193126 - DNA, 12 bp, Unknown
  misc_feature (1)..( 12): Result.006 file - promoters50/4772879
tcaaattttatt

SEQ ID NO: 193127 - DNA, 12 bp, Unknown
  misc_feature (1)..( 12): Result.006 file - promoters50/4772879
aaaaattaatga

SEQ ID NO: 193128 - DNA, 12 bp, Unknown
  misc_feature (1)..( 12): Result.006 file - promoters50/4772879
agggtttttata

SEQ ID NO: 193129 - DNA, 12 bp, Unknown
  misc_feature (1)..( 12): Result.006 file - promoters50/4772879
atgaattccggt

SEQ ID NO: 193130 - DNA, 12 bp, Unknown
  misc_feature (1)..( 12): Result.006 file - promoters50/4772879
tcatataattat

SEQ ID NO: 193131 - DNA, 12 bp, Unknown
  misc_feature (1)..( 12): Result.006 file - promoters50/4772879
atatataataaa

SEQ ID NO: 193132 - DNA, 12 bp, Unknown
  misc_feature (1)..( 12): Result.006 file - promoters50/4772879
tcaaatatggta

SEQ ID NO: 193133 - DNA, 12 bp, Unknown
  misc_feature (1)..( 12): Result.006 file - promoters50/4772879
gcataaaaaata

SEQ ID NO: 193134 - DNA, 12 bp, Unknown
  misc_feature (1)..( 12): Result.006 file - promoters50/4772879
caaaagaaaaaa

SEQ ID NO: 193135 - DNA, 12 bp, Unknown
  misc_feature (1)..( 12): Result.006 file - promoters50/4772879
taataacaaatc

SEQ ID NO: 193136 - DNA, 12 bp, Unknown
  misc_feature (1)..( 12): Result.006 file - promoters50/4772879
aattattatact

SEQ ID NO: 193137 - DNA, 11 bp, Unknown
  misc_feature (1)..( 11): Result.006 file - promoters50/4772879
taaaaagtctg

SEQ ID NO: 193138 - DNA, 11 bp, Unknown
  misc_feature (1)..( 11): Result.006 file - promoters50/4772879
gaaaaagggtt

SEQ ID NO: 193139 - DNA, 11 bp, Unknown
  misc_feature (1)..( 11): Result.006 file - promoters50/4772879
taaaaatgaag

SEQ ID NO: 193140 - DNA, 11 bp, Unknown
  misc_feature (1)..( 11): Result.006 file - promoters50/4772879
aaaaaagaaaa

SEQ ID NO: 193141 - DNA, 11 bp, Unknown
  misc_feature (1)..( 11): Result.006 file - promoters50/4772879
caaaaatcttg

SEQ ID NO: 193142 - DNA, 11 bp, Unknown
  misc_feature (1)..( 11): Result.006 file - promoters50/4772883
gttgaatgttg

SEQ ID NO: 193143 - DNA, 13 bp, Unknown
  misc_feature (1)..( 13): Result.006 file - promoters50/4772883
gtaaacaattttt

SEQ ID NO: 193144 - DNA, 13 bp, Unknown
  misc_feature (1)..( 13): Result.006 file - promoters50/4772883
aaaaacaaatcag

SEQ ID NO: 193145 - DNA, 13 bp, Unknown
  misc_feature (1)..( 13): Result.006 file - promoters50/4772883
aaaaaaaatatca

SEQ ID NO: 193146 - DNA, 13 bp, Unknown
  misc_feature (1)..( 13): Result.006 file - promoters50/4772883
attaaaaatcaaa

SEQ ID NO: 193147 - DNA, 14 bp, Unknown
  misc_feature (1)..( 14): Result.006 file - promoters50/4772883
ccaaaccaataacc

SEQ ID NO: 193148 - DNA, 14 bp, Unknown
  misc_feature (1)..( 14): Result.006 file - promoters50/4772883
aaaaaaaaattggt

SEQ ID NO: 193149 - DNA, 11 bp, Unknown
  misc_feature (1)..( 11): Result.006 file - promoters50/4772883
acaattttata

SEQ ID NO: 193150 - DNA, 11 bp, Unknown
  misc_feature (1)..( 11): Result.006 file - promoters50/4772883
tcaatttgact

SEQ ID NO: 193151 - DNA, 12 bp, Unknown
  misc_feature (1)..( 12): Result.006 file - promoters50/4772883
ctaatattaaaa

SEQ ID NO: 193152 - DNA, 12 bp, Unknown
  misc_feature (1)..( 12): Result.006 file - promoters50/4772883
aaaaaattggta

SEQ ID NO: 193153 - DNA, 12 bp, Unknown
  misc_feature (1)..( 12): Result.006 file - promoters50/4772883
ccaaattggaaa

SEQ ID NO: 193154 - DNA, 12 bp, Unknown
  misc_feature (1)..( 12): Result.006 file - promoters50/4772883
aaaatatcaaaa

SEQ ID NO: 193155 - DNA, 10 bp, Unknown
  misc_feature (1)..( 10): Result.006 file - promoters50/4772883
ttttttaaca

SEQ ID NO: 193156 - DNA, 10 bp, Unknown
  misc_feature (1)..( 10): Result.006 file - promoters50/4772883
tttattatgt

SEQ ID NO: 193157 - DNA, 10 bp, Unknown
  misc_feature (1)..( 10): Result.006 file - promoters50/4772883
tattttaaca

SEQ ID NO: 193158 - DNA, 10 bp, Unknown
  misc_feature (1)..( 10): Result.006 file - promoters50/4772883
tttgttaaaa

SEQ ID NO: 193159 - DNA, 10 bp, Unknown
  misc_feature (1)..( 10): Result.006 file - promoters50/4772883
aattttatcc

SEQ ID NO: 193160 - DNA, 10 bp, Unknown
  misc_feature (1)..( 10): Result.006 file - promoters50/4772883
cgtttgatcg

SEQ ID NO: 193161 - DNA, 10 bp, Unknown
  misc_feature (1)..( 10): Result.006 file - promoters50/4772883
caaaacactt

SEQ ID NO: 193162 - DNA, 10 bp, Unknown
  misc_feature (1)..( 10): Result.006 file - promoters50/4772883
aaaaacaaaa

SEQ ID NO: 193163 - DNA, 10 bp, Unknown
  misc_feature (1)..( 10): Result.006 file - promoters50/4772883
aaaaacttcg

SEQ ID NO: 193164 - DNA, 10 bp, Unknown
  misc_feature (1)..( 10): Result.006 file - promoters50/4772883
taaaataaaa

SEQ ID NO: 193165 - DNA, 10 bp, Unknown
  misc_feature (1)..( 10): Result.006 file - promoters50/4772883
caaaagaaat

SEQ ID NO: 193166 - DNA, 13 bp, Unknown
  misc_feature (1)..( 13): Result.006 file - promoters50/4772883
ataaacaatttta

SEQ ID NO: 193167 - DNA, 13 bp, Unknown
  misc_feature (1)..( 13): Result.006 file - promoters50/4772883
caaaacaaaacag

SEQ ID NO: 193168 - DNA, 13 bp, Unknown
  misc_feature (1)..( 13): Result.006 file - promoters50/4772883
aaaaaaaattggt

SEQ ID NO: 193169 - DNA, 13 bp, Unknown
  misc_feature (1)..( 13): Result.006 file - promoters50/4772883
aaaaacaaatcag

SEQ ID NO: 193170 - DNA, 14 bp, Unknown
  misc_feature (1)..( 14): Result.006 file - promoters50/4772883
aaaaatcaaaacga

SEQ ID NO: 193171 - DNA, 14 bp, Unknown
  misc_feature (1)..( 14): Result.006 file - promoters50/4772883
ccaaaccaataacc

SEQ ID NO: 193172 - DNA, 10 bp, Unknown
  misc_feature (1)..( 10): Result.006 file - promoters50/4772883
atactaattt

SEQ ID NO: 193173 - DNA, 10 bp, Unknown
  misc_feature (1)..( 10): Result.006 file - promoters50/4772883
ataataattt

SEQ ID NO: 193174 - DNA, 10 bp, Unknown
  misc_feature (1)..( 10): Result.006 file - promoters50/4772883
ttacaaatga

SEQ ID NO: 193175 - DNA, 10 bp, Unknown
  misc_feature (1)..( 10): Result.006 file - promoters50/4772883
caacacatgt

SEQ ID NO: 193176 - DNA, 10 bp, Unknown
  misc_feature (1)..( 10): Result.006 file - promoters50/4772887
gtaataacct

SEQ ID NO: 193177 - DNA, 10 bp, Unknown
  misc_feature (1)..( 10): Result.006 file - promoters50/4772887
ttttttatta

SEQ ID NO: 193178 - DNA, 10 bp, Unknown
  misc_feature (1)..( 10): Result.006 file - promoters50/4772887
ttttctattt

SEQ ID NO: 193179 - DNA, 10 bp, Unknown
  misc_feature (1)..( 10): Result.006 file - promoters50/4772917
atttctttta

SEQ ID NO: 193180 - DNA, 8 bp, Unknown
  misc_feature (1)..( 8): Result.006 file - promoters50/4772917
catatact

SEQ ID NO: 193181 - DNA, 8 bp, Unknown
  misc_feature (1)..( 8): Result.006 file - promoters50/4772917
cataaact

SEQ ID NO: 193182 - DNA, 8 bp, Unknown
  misc_feature (1)..( 8): Result.006 file - promoters50/4772917
aaaaatct

SEQ ID NO: 193183 - DNA, 10 bp, Unknown
  misc_feature (1)..( 10): Result.006 file - promoters50/4772917
aaactcctat

SEQ ID NO: 193184 - DNA, 10 bp, Unknown
  misc_feature (1)..( 10): Result.006 file - promoters50/4772917
tctctcttat

SEQ ID NO: 193185 - DNA, 10 bp, Unknown
  misc_feature (1)..( 10): Result.006 file - promoters50/4772925
tctctcttct

SEQ ID NO: 193186 - DNA, 9 bp, Unknown
  misc_feature (1)..( 9): Result.006 file - promoters50/4772925
atgtttttt

SEQ ID NO: 193187 - DNA, 9 bp, Unknown
  misc_feature (1)..( 9): Result.006 file - promoters50/4772925
atggttttc

SEQ ID NO: 193188 - DNA, 9 bp, Unknown
  misc_feature (1)..( 9): Result.006 file - promoters50/4772925
acatttttt

SEQ ID NO: 193189 - DNA, 14 bp, Unknown
  misc_feature (1)..( 14): Result.006 file - promoters50/4772925
cagtggtaacaaaa

SEQ ID NO: 193190 - DNA, 14 bp, Unknown
  misc_feature (1)..( 14): Result.006 file - promoters50/4772925
ttgttataaaaaaa

SEQ ID NO: 193191 - DNA, 14 bp, Unknown
  misc_feature (1)..( 14): Result.006 file - promoters50/4772925
ttgtcatagaaacg

SEQ ID NO: 193192 - DNA, 9 bp, Unknown
  misc_feature (1)..( 9): Result.006 file - promoters50/4772925
gttatatga

SEQ ID NO: 193193 - DNA, 9 bp, Unknown
  misc_feature (1)..( 9): Result.006 file - promoters50/4772925
gttatatgt

SEQ ID NO: 193194 - DNA, 9 bp, Unknown
  misc_feature (1)..( 9): Result.006 file - promoters50/4772947
aaaatatgt

SEQ ID NO: 193195 - DNA, 7 bp, Unknown
  misc_feature (1)..( 7): Result.006 file - promoters50/4772947
aaaataa

SEQ ID NO: 193196 - DNA, 7 bp, Unknown
  misc_feature (1)..( 7): Result.006 file - promoters50/4772947
aaactaa

SEQ ID NO: 193197 - DNA, 7 bp, Unknown
  misc_feature (1)..( 7): Result.006 file - promoters50/4772947
aaactat

SEQ ID NO: 193198 - DNA, 9 bp, Unknown
  misc_feature (1)..( 9): Result.006 file - promoters50/4772947
agtttttca

SEQ ID NO: 193199 - DNA, 9 bp, Unknown
  misc_feature (1)..( 9): Result.006 file - promoters50/4772947
agtttttct

SEQ ID NO: 193200 - DNA, 9 bp, Unknown
  misc_feature (1)..( 9): Result.006 file - promoters50/4772983
tatttttct

SEQ ID NO: 193201 - DNA, 9 bp, Unknown
  misc_feature (1)..( 9): Result.006 file - promoters50/4772983
tgcaaagag

SEQ ID NO: 193202 - DNA, 9 bp, Unknown
  misc_feature (1)..( 9): Result.006 file - promoters50/4772983
atcaacgag

SEQ ID NO: 193203 - DNA, 9 bp, Unknown
  misc_feature (1)..( 9): Result.006 file - promoters50/4772983
tgcgaagta

SEQ ID NO: 193204 - DNA, 12 bp, Unknown
  misc_feature (1)..( 12): Result.006 file - promoters50/4772983
gaagcctgcaag

SEQ ID NO: 193205 - DNA, 12 bp, Unknown
  misc_feature (1)..( 12): Result.006 file - promoters50/4772983
gaagcttgcgga

SEQ ID NO: 193206 - DNA, 12 bp, Unknown
  misc_feature (1)..( 12): Result.006 file - promoters50/4772991
cagtcttgtgga

SEQ ID NO: 193207 - DNA, 7 bp, Unknown
  misc_feature (1)..( 7): Result.006 file - promoters50/4772991
cttggat

SEQ ID NO: 193208 - DNA, 7 bp, Unknown
  misc_feature (1)..( 7): Result.006 file - promoters50/4772991
gttggat

SEQ ID NO: 193209 - DNA, 7 bp, Unknown
  misc_feature (1)..( 7): Result.006 file - promoters50/4772991
cttcgat

SEQ ID NO: 193210 - DNA, 7 bp, Unknown
  misc_feature (1)..( 7): Result.006 file - promoters50/4772991
gtttgat

SEQ ID NO: 193211 - DNA, 10 bp, Unknown
  misc_feature (1)..( 10): Result.006 file - promoters50/4772991
ttatcaattt

SEQ ID NO: 193212 - DNA, 10 bp, Unknown
  misc_feature (1)..( 10): Result.006 file - promoters50/4772991
ttataaattt

SEQ ID NO: 193213 - DNA, 10 bp, Unknown
  misc_feature (1)..( 10): Result.006 file - promoters50/4772991
tcctaaattc

SEQ ID NO: 193214 - DNA, 10 bp, Unknown
  misc_feature (1)..( 10): Result.006 file - promoters50/4772995
agataaatga

SEQ ID NO: 193215 - DNA, 6 bp, Unknown
  misc_feature (1)..( 6): Result.006 file - promoters50/4772995
tttgat

SEQ ID NO: 193216 - DNA, 6 bp, Unknown
  misc_feature (1)..( 6): Result.006 file - promoters50/4772995
tttgat

SEQ ID NO: 193217 - DNA, 6 bp, Unknown
  misc_feature (1)..( 6): Result.006 file - promoters50/4772995
tttgat

SEQ ID NO: 193218 - DNA, 10 bp, Unknown
  misc_feature (1)..( 10): Result.006 file - promoters50/4772995
ccatattaaa

SEQ ID NO: 193219 - DNA, 10 bp, Unknown
  misc_feature (1)..( 10): Result.006 file - promoters50/4772995
ccaaattaac

SEQ ID NO: 193220 - DNA, 10 bp, Unknown
  misc_feature (1)..( 10): Result.006 file - promoters50/4773015
atccattaac

SEQ ID NO: 193221 - DNA, 10 bp, Unknown
  misc_feature (1)..( 10): Result.006 file - promoters50/4773015
accaaaaaaa

SEQ ID NO: 193222 - DNA, 10 bp, Unknown
  misc_feature (1)..( 10): Result.006 file - promoters50/4773015
cacaaaaaaa

SEQ ID NO: 193223 - DNA, 10 bp, Unknown
  misc_feature (1)..( 10): Result.006 file - promoters50/4773035
accaaaatca

SEQ ID NO: 193224 - DNA, 12 bp, Unknown
  misc_feature (1)..( 12): Result.006 file - promoters50/4773035
tcctaaaaaaat

SEQ ID NO: 193225 - DNA, 12 bp, Unknown
  misc_feature (1)..( 12): Result.006 file - promoters50/4773035
gtgaaaaataat

SEQ ID NO: 193226 - DNA, 12 bp, Unknown
  misc_feature (1)..( 12): Result.006 file - promoters50/4773035
ttacagaaaaat

SEQ ID NO: 193227 - DNA, 12 bp, Unknown
  misc_feature (1)..( 12): Result.006 file - promoters50/4773035
ttacaaaatagg

SEQ ID NO: 193228 - DNA, 12 bp, Unknown
  misc_feature (1)..( 12): Result.006 file - promoters50/4773035
ttagaaaatcca

SEQ ID NO: 193229 - DNA, 12 bp, Unknown
  misc_feature (1)..( 12): Result.006 file - promoters50/4773035
tactaaaaccaa

SEQ ID NO: 193230 - DNA, 12 bp, Unknown
  misc_feature (1)..( 12): Result.006 file - promoters50/4773035
tagagaaattta

SEQ ID NO: 193231 - DNA, 15 bp, Unknown
  misc_feature (1)..( 15): Result.006 file - promoters50/4773035
cacacaaaattatta

SEQ ID NO: 193232 - DNA, 15 bp, Unknown
  misc_feature (1)..( 15): Result.006 file - promoters50/4773035
ttgatgaaattatta

SEQ ID NO: 193233 - DNA, 15 bp, Unknown
  misc_feature (1)..( 15): Result.006 file - promoters50/4773035
ttatcaaaattgtgg

SEQ ID NO: 193234 - DNA, 15 bp, Unknown
  misc_feature (1)..( 15): Result.006 file - promoters50/4773035
ttttgaaaatgtgtt

SEQ ID NO: 193235 - DNA, 15 bp, Unknown
  misc_feature (1)..( 15): Result.006 file - promoters50/4773035
atattaaaaagtctg

SEQ ID NO: 193236 - DNA, 15 bp, Unknown
  misc_feature (1)..( 15): Result.006 file - promoters50/4773046
atattaaagtaaacc

SEQ ID NO: 193237 - DNA, 9 bp, Unknown
  misc_feature (1)..( 9): Result.006 file - promoters50/4773046
cgatgtttt

SEQ ID NO: 193238 - DNA, 9 bp, Unknown
  misc_feature (1)..( 9): Result.006 file - promoters50/4773046
gaatgtttc

SEQ ID NO: 193239 - DNA, 10 bp, Unknown
  misc_feature (1)..( 10): Result.006 file - promoters50/4773046
acatggtttt

SEQ ID NO: 193240 - DNA, 10 bp, Unknown
  misc_feature (1)..( 10): Result.006 file - promoters50/4773046
atgttatttt

SEQ ID NO: 193241 - DNA, 11 bp, Unknown
  misc_feature (1)..( 11): Result.006 file - promoters50/4773068
attttagttta

SEQ ID NO: 193242 - DNA, 8 bp, Unknown
  misc_feature (1)..( 8): Result.006 file - promoters50/4773068
ttcttgcc

SEQ ID NO: 193243 - DNA, 8 bp, Unknown
  misc_feature (1)..( 8): Result.006 file - promoters50/4773068
ttctggcc

SEQ ID NO: 193244 - DNA, 8 bp, Unknown
  misc_feature (1)..( 8): Result.006 file - promoters50/4773068
gtcttgcg

SEQ ID NO: 193245 - DNA, 31 bp, Unknown; identical to SEQ ID NO: 72331
  misc_feature (1)..( 31): Result.006 file - promoters50/4773068

SEQ ID NO: 193246 - DNA, 31 bp, Unknown; identical to SEQ ID NO: 186078
  misc_feature (1)..( 31): Result.006 file - promoters50/4773068

SEQ ID NO: 193247 - DNA, 31 bp, Unknown; identical to SEQ ID NO: 186077
  misc_feature (1)..( 31): Result.006 file - promoters50/4773068

SEQ ID NO: 193248 - DNA, 30 bp, Unknown; identical to SEQ ID NO: 71939
  misc_feature (1)..( 30): Result.006 file - promoters50/4773068

SEQ ID NO: 193249 - DNA, 30 bp, Unknown; identical to SEQ ID NO: 184369
  misc_feature (1)..( 30): Result.006 file - promoters50/4773068

SEQ ID NO: 193250 - DNA, 30 bp, Unknown; identical to SEQ ID NO: 184367
  misc_feature (1)..( 30): Result.006 file - promoters50/4773068

SEQ ID NO: 193251 - DNA, 15 bp, Unknown
  misc_feature (1)..( 15): Result.006 file - promoters50/4773068
cgccttagctttctc

SEQ ID NO: 193252 - DNA, 15 bp, Unknown
  misc_feature (1)..( 15): Result.006 file - promoters50/4773068
cgccttagctttctc

SEQ ID NO: 193253 - DNA, 15 bp, Unknown
  misc_feature (1)..( 15): Result.006 file - promoters50/4773068
cgccttagctttctc

SEQ ID NO: 193254 - DNA, 22 bp, Unknown
  misc_feature (1)..( 22): Result.006 file - promoters50/4773068
gaccgagtcgtcctcgtctttt

SEQ ID NO: 193255 - DNA, 22 bp, Unknown
  misc_feature (1)..( 22): Result.006 file - promoters50/4773068
gaccgactcgtcctcgtctttt

SEQ ID NO: 193256 - DNA, 22 bp, Unknown
  misc_feature (1)..( 22): Result.006 file - promoters50/4773068
gacctagtcgtcctcgtctttt

SEQ ID NO: 193257 - DNA, 19 bp, Unknown
  misc_feature (1)..( 19): Result.006 file - promoters50/4773068
ttttgcttctataaatcaa

SEQ ID NO: 193258 - DNA, 19 bp, Unknown
  misc_feature (1)..( 19): Result.006 file - promoters50/4773068
ttcttcttctataaaacaa

SEQ ID NO: 193259 - DNA, 19 bp, Unknown
  misc_feature (1)..( 19): Result.006 file - promoters50/4773068
gatctttgccggaaaacaa

SEQ ID NO: 193260 - DNA, 19 bp, Unknown
  misc_feature (1)..( 19): Result.006 file - promoters50/4773068
ttcttcttctataaattaa

SEQ ID NO: 193261 - DNA, 9 bp, Unknown
  misc_feature (1)..( 9): Result.006 file - promoters50/4773068
caataaaac

SEQ ID NO: 193262 - DNA, 9 bp, Unknown
  misc_feature (1)..( 9): Result.006 file - promoters50/4773068
caaaaaaaa

SEQ ID NO: 193263 - DNA, 9 bp, Unknown
  misc_feature (1)..( 9): Result.006 file - promoters50/4773068
gaaaacaac

SEQ ID NO: 193264 - DNA, 6 bp, Unknown
  misc_feature (1)..( 6): Result.006 file - promoters50/4773068
aaaaca

SEQ ID NO: 193265 - DNA, 6 bp, Unknown
  misc_feature (1)..( 6): Result.006 file - promoters50/4773068
aaaaca

SEQ ID NO: 193266 - DNA, 6 bp, Unknown
  misc_feature (1)..( 6): Result.006 file - promoters50/4773074
aaaaca

SEQ ID NO: 193267 - DNA, 8 bp, Unknown
  misc_feature (1)..( 8): Result.006 file - promoters50/4773074
actataaa

SEQ ID NO: 193268 - DNA, 8 bp, Unknown
  misc_feature (1)..( 8): Result.006 file - promoters50/4773074
tgtataaa

SEQ ID NO: 193269 - DNA, 8 bp, Unknown
  misc_feature (1)..( 8): Result.006 file - promoters50/4773074
tatataaa

SEQ ID NO: 193270 - DNA, 8 bp, Unknown
  misc_feature (1)..( 8): Result.006 file - promoters50/4773074
actataaa

SEQ ID NO: 193271 - DNA, 8 bp, Unknown
  misc_feature (1)..( 8): Result.006 file - promoters50/4773074
tatataaa

SEQ ID NO: 193272 - DNA, 8 bp, Unknown
  misc_feature (1)..( 8): Result.006 file - promoters50/4773074
cttataaa

SEQ ID NO: 193273 - DNA, 10 bp, Unknown
  misc_feature (1)..( 10): Result.006 file - promoters50/4773074
taaaacccta

SEQ ID NO: 193274 - DNA, 10 bp, Unknown
  misc_feature (1)..( 10): Result.006 file - promoters50/4773074
caaagccctt

SEQ ID NO: 193275 - DNA, 10 bp, Unknown
  misc_feature (1)..( 10): Result.006 file - promoters50/4773074
aagaacccta

SEQ ID NO: 193276 - DNA, 10 bp, Unknown
  misc_feature (1)..( 10): Result.006 file - promoters50/4773074
caaaacctag

SEQ ID NO: 193277 - DNA, 10 bp, Unknown
  misc_feature (1)..( 10): Result.006 file - promoters50/4773074
taaaaccctc

SEQ ID NO: 193278 - DNA, 10 bp, Unknown
  misc_feature (1)..( 10): Result.006 file - promoters50/4773085
caaaacaaaa

SEQ ID NO: 193279 - DNA, 10 bp, Unknown
  misc_feature (1)..( 10): Result.006 file - promoters50/4773085
actcaggaag

SEQ ID NO: 193280 - DNA, 10 bp, Unknown
  misc_feature (1)..( 10): Result.006 file - promoters50/4773085
actaaggaaa

SEQ ID NO: 193281 - DNA, 10 bp, Unknown
  misc_feature (1)..( 10): Result.006 file - promoters50/4773085
agagaggaag

SEQ ID NO: 193282 - DNA, 10 bp, Unknown
  misc_feature (1)..( 10): Result.006 file - promoters50/4773085
aagaagaaaa

SEQ ID NO: 193283 - DNA, 10 bp, Unknown
  misc_feature (1)..( 10): Result.006 file - promoters50/4773085
cctaacgaat

SEQ ID NO: 193284 - DNA, 10 bp, Unknown
  misc_feature (1)..( 10): Result.006 file - promoters50/4773085
gctaaggaca

SEQ ID NO: 193285 - DNA, 10 bp, Unknown
  misc_feature (1)..( 10): Result.006 file - promoters50/4773085
tataagaaat

SEQ ID NO: 193286 - DNA, 10 bp, Unknown
  misc_feature (1)..( 10): Result.006 file - promoters50/4773085
ttaaaggaaa

SEQ ID NO: 193287 - DNA, 14 bp, Unknown
  misc_feature (1)..( 14): Result.006 file - promoters50/4773085
agaaacatctcttt

SEQ ID NO: 193288 - DNA, 14 bp, Unknown
  misc_feature (1)..( 14): Result.006 file - promoters50/4773085
taaaacatccatta

SEQ ID NO: 193289 - DNA, 14 bp, Unknown
  misc_feature (1)..( 14): Result.006 file - promoters50/4773085
agatacaaatccct

SEQ ID NO: 193290 - DNA, 14 bp, Unknown
  misc_feature (1)..( 14): Result.006 file - promoters50/4773085
cacgacatccattt

SEQ ID NO: 193291 - DNA, 14 bp, Unknown
  misc_feature (1)..( 14): Result.006 file - promoters50/4773085
ccaaagatagaaat

SEQ ID NO: 193292 - DNA, 14 bp, Unknown
  misc_feature (1)..( 14): Result.006 file - promoters50/4773085
gtaaaaataaagcc

SEQ ID NO: 193293 - DNA, 8 bp, Unknown
  misc_feature (1)..( 8): Result.006 file - promoters50/4773085
tatataaa

SEQ ID NO: 193294 - DNA, 8 bp, Unknown
  misc_feature (1)..( 8): Result.006 file - promoters50/4773085
tatataaa

SEQ ID NO: 193295 - DNA, 8 bp, Unknown
  misc_feature (1)..( 8): Result.006 file - promoters50/4773085
aatataat

SEQ ID NO: 193296 - DNA, 8 bp, Unknown
  misc_feature (1)..( 8): Result.006 file - promoters50/4773085
tatataat

SEQ ID NO: 193297 - DNA, 8 bp, Unknown
  misc_feature (1)..( 8): Result.006 file - promoters50/4773085
tatataaa

SEQ ID NO: 193298 - DNA, 8 bp, Unknown
  misc_feature (1)..( 8): Result.006 file - promoters50/4773085
tatatata

SEQ ID NO: 193299 - DNA, 8 bp, Unknown
  misc_feature (1)..( 8): Result.006 file - promoters50/4773085
tatatatc

SEQ ID NO: 193300 - DNA, 13 bp, Unknown
  misc_feature (1)..( 13): Result.006 file - promoters50/4773085
tctgatctctgat

SEQ ID NO: 193301 - DNA, 13 bp, Unknown
  misc_feature (1)..( 13): Result.006 file - promoters50/4773085
tctaatctctcca

SEQ ID NO: 193302 - DNA, 13 bp, Unknown
  misc_feature (1)..( 13): Result.006 file - promoters50/4773085
cctaatctatata

SEQ ID NO: 193303 - DNA, 13 bp, Unknown
  misc_feature (1)..( 13): Result.006 file - promoters50/4773085
gtcaatctaaata

SEQ ID NO: 193304 - DNA, 13 bp, Unknown
  misc_feature (1)..( 13): Result.006 file - promoters50/4773085
cctaattaattgg

SEQ ID NO: 193305 - DNA, 13 bp, Unknown
  misc_feature (1)..( 13): Result.006 file - promoters50/4773085
tctaattttgctc

SEQ ID NO: 193306 - DNA, 11 bp, Unknown
  misc_feature (1)..( 11): Result.006 file - promoters50/4773085
attaattatta

SEQ ID NO: 193307 - DNA, 11 bp, Unknown
  misc_feature (1)..( 11): Result.006 file - promoters50/4773085
acctattttta

SEQ ID NO: 193308 - DNA, 10 bp, Unknown
  misc_feature (1)..( 10): Result.006 file - promoters50/4773085
ctaaatatag

SEQ ID NO: 193309 - DNA, 12 bp, Unknown
  misc_feature (1)..( 12): Result.006 file - promoters50/4773085
ctaatctatata

SEQ ID NO: 193310 - DNA, 12 bp, Unknown
  misc_feature (1)..( 12): Result.006 file - promoters50/4773085
ctaattttgctc

SEQ ID NO: 193311 - DNA, 13 bp, Unknown
  misc_feature (1)..( 13): Result.006 file - promoters50/4773089
gtaaaaataaagc

SEQ ID NO: 193312 - DNA, 10 bp, Unknown
  misc_feature (1)..( 10): Result.006 file - promoters50/4773089
aacgataaga

SEQ ID NO: 193313 - DNA, 10 bp, Unknown
  misc_feature (1)..( 10): Result.006 file - promoters50/4773089
gacgacaagc

SEQ ID NO: 193314 - DNA, 10 bp, Unknown
  misc_feature (1)..( 10): Result.006 file - promoters50/4773089
aaaaataaga

SEQ ID NO: 193315 - DNA, 10 bp, Unknown
  misc_feature (1)..( 10): Result.006 file - promoters50/4773089
aaacataagt

SEQ ID NO: 193316 - DNA, 10 bp, Unknown
  misc_feature (1)..( 10): Result.006 file - promoters50/4773089
aaaaataaac

SEQ ID NO: 193317 - DNA, 10 bp, Unknown
  misc_feature (1)..( 10): Result.006 file - promoters50/4773089
taaaatattc

SEQ ID NO: 193318 - DNA, 8 bp, Unknown
  misc_feature (1)..( 8): Result.006 file - promoters50/4773089
taaataat

SEQ ID NO: 193319 - DNA, 8 bp, Unknown
  misc_feature (1)..( 8): Result.006 file - promoters50/4773089
taactaaa

SEQ ID NO: 193320 - DNA, 8 bp, Unknown
  misc_feature (1)..( 8): Result.006 file - promoters50/4773089
gaaaaaat

SEQ ID NO: 193321 - DNA, 8 bp, Unknown
  misc_feature (1)..( 8): Result.006 file - promoters50/4773089
taactagt

SEQ ID NO: 193322 - DNA, 8 bp, Unknown
  misc_feature (1)..( 8): Result.006 file - promoters50/4773089
taactact

SEQ ID NO: 193323 - DNA, 8 bp, Unknown
  misc_feature (1)..( 8): Result.006 file - promoters50/4773089
gaaaaaaa

SEQ ID NO: 193324 - DNA, 17 bp, Unknown
  misc_feature (1)..( 17): Result.006 file - promoters50/4773089
tttagtcatattataaa

SEQ ID NO: 193325 - DNA, 17 bp, Unknown
  misc_feature (1)..( 17): Result.006 file - promoters50/4773089
tgtaattttattataaa

SEQ ID NO: 193326 - DNA, 17 bp, Unknown
  misc_feature (1)..( 17): Result.006 file - promoters50/4773089
cttaactttatcatatt

SEQ ID NO: 193327 - DNA, 17 bp, Unknown
  misc_feature (1)..( 17): Result.006 file - promoters50/4773089
attaacttcatcaaacc

SEQ ID NO: 193328 - DNA, 17 bp, Unknown
  misc_feature (1)..( 17): Result.006 file - promoters50/4773089
cttaaatttttaataca

SEQ ID NO: 193329 - DNA, 17 bp, Unknown
  misc_feature (1)..( 17): Result.006 file - promoters50/4773089
tgtcaatttttctttca

SEQ ID NO: 193330 - DNA, 11 bp, Unknown
  misc_feature (1)..( 11): Result.006 file - promoters50/4773089
aacaatttgaa

SEQ ID NO: 193331 - DNA, 11 bp, Unknown
  misc_feature (1)..( 11): Result.006 file - promoters50/4773089
ataaatttgtc

SEQ ID NO: 193332 - DNA, 12 bp, Unknown
  misc_feature (1)..( 12): Result.006 file - promoters50/4773089
aaaatattcgaa

SEQ ID NO: 193333 - DNA, 12 bp, Unknown
  misc_feature (1)..( 12): Result.006 file - promoters50/4773089
cataagtttcaa

SEQ ID NO: 193334 - DNA, 12 bp, Unknown
  misc_feature (1)..( 12): Result.006 file - promoters50/4773089
caaaaataagat

SEQ ID NO: 193335 - DNA, 12 bp, Unknown
  misc_feature (1)..( 12): Result.006 file - promoters50/4773089
attaactttgag

SEQ ID NO: 193336 - DNA, 12 bp, Unknown
  misc_feature (1)..( 12): Result.006 file - promoters50/4773093
gaaaaataaact

SEQ ID NO: 193337 - DNA, 8 bp, Unknown
  misc_feature (1)..( 8): Result.006 file - promoters50/4773093
tttgatgt

SEQ ID NO: 193338 - DNA, 8 bp, Unknown
  misc_feature (1)..( 8): Result.006 file - promoters50/4773093
tttgatca

SEQ ID NO: 193339 - DNA, 8 bp, Unknown
  misc_feature (1)..( 8): Result.006 file - promoters50/4773093
tttgatat

SEQ ID NO: 193340 - DNA, 8 bp, Unknown
  misc_feature (1)..( 8): Result.006 file - promoters50/4773093
gttgttat

SEQ ID NO: 193341 - DNA, 8 bp, Unknown
  misc_feature (1)..( 8): Result.006 file - promoters50/4773093
ttttcatc

SEQ ID NO: 193342 - DNA, 8 bp, Unknown
  misc_feature (1)..( 8): Result.006 file - promoters50/4773093
tttttatc

SEQ ID NO: 193343 - DNA, 8 bp, Unknown
  misc_feature (1)..( 8): Result.006 file - promoters50/4773093
tttccatt

SEQ ID NO: 193344 - DNA, 8 bp, Unknown
  misc_feature (1)..( 8): Result.006 file - promoters50/4773093
tttctctg

SEQ ID NO: 193345 - DNA, 9 bp, Unknown
  misc_feature (1)..( 9): Result.006 file - promoters50/4773093
gattttttt

SEQ ID NO: 193346 - DNA, 9 bp, Unknown
  misc_feature (1)..( 9): Result.006 file - promoters50/4773093
tattttttt

SEQ ID NO: 193347 - DNA, 9 bp, Unknown
  misc_feature (1)..( 9): Result.006 file - promoters50/4773093
gattttgag

SEQ ID NO: 193348 - DNA, 7 bp, Unknown
  misc_feature (1)..( 7): Result.006 file - promoters50/4773093
tgatttt

SEQ ID NO: 193349 - DNA, 7 bp, Unknown
  misc_feature (1)..( 7): Result.006 file - promoters50/4773093
tgatttg

SEQ ID NO: 193350 - DNA, 7 bp, Unknown
  misc_feature (1)..( 7): Result.006 file - promoters50/4773093
agatttt

SEQ ID NO: 193351 - DNA, 10 bp, Unknown
  misc_feature (1)..( 10): Result.006 file - promoters50/4773093
ttcctctctc

SEQ ID NO: 193352 - DNA, 10 bp, Unknown
  misc_feature (1)..( 10): Result.006 file - promoters50/4773093
tttctctctt

SEQ ID NO: 193353 - DNA, 10 bp, Unknown
  misc_feature (1)..( 10): Result.006 file - promoters50/4773093
tttcactctt

SEQ ID NO: 193354 - DNA, 12 bp, Unknown
  misc_feature (1)..( 12): Result.006 file - promoters50/4773093
gtaactttaaat

SEQ ID NO: 193355 - DNA, 12 bp, Unknown
  misc_feature (1)..( 12): Result.006 file - promoters50/4773093
gcaacttgaaat

SEQ ID NO: 193356 - DNA, 12 bp, Unknown
  misc_feature (1)..( 12): Result.006 file - promoters50/4773101
taaacattcata

SEQ ID NO: 193357 - DNA, 8 bp, Unknown
  misc_feature (1)..( 8): Result.006 file - promoters50/4773101
gaaagttt

SEQ ID NO: 193358 - DNA, 8 bp, Unknown
  misc_feature (1)..( 8): Result.006 file - promoters50/4773101
taaaattt

SEQ ID NO: 193359 - DNA, 8 bp, Unknown
  misc_feature (1)..( 8): Result.006 file - promoters50/4773108
taaaataa

SEQ ID NO: 193360 - DNA, 11 bp, Unknown
  misc_feature (1)..( 11): Result.006 file - promoters50/4773108
cttgaatattc

SEQ ID NO: 193361 - DNA, 11 bp, Unknown
  misc_feature (1)..( 11): Result.006 file - promoters50/4773108
gttgaattttt

SEQ ID NO: 193362 - DNA, 11 bp, Unknown
  misc_feature (1)..( 11): Result.006 file - promoters50/4773108
gttgacttttt

SEQ ID NO: 193363 - DNA, 7 bp, Unknown
  misc_feature (1)..( 7): Result.006 file - promoters50/4773108
cacagtt

SEQ ID NO: 193364 - DNA, 7 bp, Unknown
  misc_feature (1)..( 7): Result.006 file - promoters50/4773108
cacggtt

SEQ ID NO: 193365 - DNA, 7 bp, Unknown
  misc_feature (1)..( 7): Result.006 file - promoters50/4773112
cacagtt

SEQ ID NO: 193366 - DNA, 9 bp, Unknown
  misc_feature (1)..( 9): Result.006 file - promoters50/4773112
ggttatttt

SEQ ID NO: 193367 - DNA, 9 bp, Unknown
  misc_feature (1)..( 9): Result.006 file - promoters50/4773112
tgttaattt

SEQ ID NO: 193368 - DNA, 9 bp, Unknown
  misc_feature (1)..( 9): Result.006 file - promoters50/4773112
tgttaaaca

SEQ ID NO: 193369 - DNA, 8 bp, Unknown
  misc_feature (1)..( 8): Result.006 file - promoters50/4773112
cattcggt

SEQ ID NO: 193370 - DNA, 8 bp, Unknown
  misc_feature (1)..( 8): Result.006 file - promoters50/4773112
cattcgga

SEQ ID NO: 193371 - DNA, 8 bp, Unknown
  misc_feature (1)..( 8): Result.006 file - promoters50/4773121
cattagga

SEQ ID NO: 193372 - DNA, 7 bp, Unknown
  misc_feature (1)..( 7): Result.006 file - promoters50/4773121
caaaaat

SEQ ID NO: 193373 - DNA, 7 bp, Unknown
  misc_feature (1)..( 7): Result.006 file - promoters50/4773121
caaaaac

SEQ ID NO: 193374 - DNA, 7 bp, Unknown
  misc_feature (1)..( 7): Result.006 file - promoters50/4773124
caacaac

SEQ ID NO: 193375 - DNA, 8 bp, Unknown
  misc_feature (1)..( 8): Result.006 file - promoters50/4773124
tgattttt

SEQ ID NO: 193376 - DNA, 8 bp, Unknown
  misc_feature (1)..( 8): Result.006 file - promoters50/4773124
tgatcttt

SEQ ID NO: 193377 - DNA, 8 bp, Unknown
  misc_feature (1)..( 8): Result.006 file - promoters50/4773124
ctatcttt

SEQ ID NO: 193378 - DNA, 8 bp, Unknown
  misc_feature (1)..( 8): Result.006 file - promoters50/4773124
ttctctag

SEQ ID NO: 193379 - DNA, 8 bp, Unknown
  misc_feature (1)..( 8): Result.006 file - promoters50/4773124
atctttag

SEQ ID NO: 193380 - DNA, 8 bp, Unknown
  misc_feature (1)..( 8): Result.006 file - promoters50/4773124
atctttca

SEQ ID NO: 193381 - DNA, 10 bp, Unknown
  misc_feature (1)..( 10): Result.006 file - promoters50/4773124
atacagaaag

SEQ ID NO: 193382 - DNA, 10 bp, Unknown
  misc_feature (1)..( 10): Result.006 file - promoters50/4773124
atatagaaat

SEQ ID NO: 193383 - DNA, 10 bp, Unknown
  misc_feature (1)..( 10): Result.006 file - promoters50/4773124
ttattgaaat

SEQ ID NO: 193384 - DNA, 8 bp, Unknown
  misc_feature (1)..( 8): Result.006 file - promoters50/4773124
aatatatt

SEQ ID NO: 193385 - DNA, 8 bp, Unknown
  misc_feature (1)..( 8): Result.006 file - promoters50/4773124
tatatatt

SEQ ID NO: 193386 - DNA, 8 bp, Unknown
  misc_feature (1)..( 8): Result.006 file - promoters50/4773124
aatatagt

SEQ ID NO: 193387 - DNA, 7 bp, Unknown
  misc_feature (1)..( 7): Result.006 file - promoters50/4773124
ttctaat

SEQ ID NO: 193388 - DNA, 7 bp, Unknown
  misc_feature (1)..( 7): Result.006 file - promoters50/4773124
ttctaag

SEQ ID NO: 193389 - DNA, 7 bp, Unknown
  misc_feature (1)..( 7): Result.006 file - promoters50/4773127
ttctaat

SEQ ID NO: 193390 - DNA, 14 bp, Unknown
  misc_feature (1)..( 14): Result.006 file - promoters50/4773127
tgttaataattcgt

SEQ ID NO: 193391 - DNA, 14 bp, Unknown
  misc_feature (1)..( 14): Result.006 file - promoters50/4773127
ctttaaaaattcac

SEQ ID NO: 193392 - DNA, 14 bp, Unknown
  misc_feature (1)..( 14): Result.006 file - promoters50/4773127
tgtgaattgtgatg

SEQ ID NO: 193393 - DNA, 14 bp, Unknown
  misc_feature (1)..( 14): Result.006 file - promoters50/4773127
aagatttaattctg

SEQ ID NO: 193394 - DNA, 14 bp, Unknown
  misc_feature (1)..( 14): Result.006 file - promoters50/4773127
acagctaaatacac

SEQ ID NO: 193395 - DNA, 14 bp, Unknown
  misc_feature (1)..( 14): Result.006 file - promoters50/4773127
atacaaaaattagc

SEQ ID NO: 193396 - DNA, 14 bp, Unknown
  misc_feature (1)..( 14): Result.006 file - promoters50/4773134
tataaatatcagcc

SEQ ID NO: 193397 - DNA, 14 bp, Unknown
  misc_feature (1)..( 14): Result.006 file - promoters50/4773134
atttaatagtcatt

SEQ ID NO: 193398 - DNA, 14 bp, Unknown
  misc_feature (1)..( 14): Result.006 file - promoters50/4773134
tactaatactcaaa

SEQ ID NO: 193399 - DNA, 14 bp, Unknown
  misc_feature (1)..( 14): Result.006 file - promoters50/4773134
atttgatagtgatt

SEQ ID NO: 193400 - DNA, 8 bp, Unknown
  misc_feature (1)..( 8): Result.006 file - promoters50/4773134
aatattga

SEQ ID NO: 193401 - DNA, 8 bp, Unknown
  misc_feature (1)..( 8): Result.006 file - promoters50/4773134
aattttgg

SEQ ID NO: 193402 - DNA, 8 bp, Unknown
  misc_feature (1)..( 8): Result.006 file - promoters50/4773134
tgttttgg

SEQ ID NO: 193403 - DNA, 9 bp, Unknown
  misc_feature (1)..( 9): Result.006 file - promoters50/4773134
tatatttga

SEQ ID NO: 193404 - DNA, 9 bp, Unknown
  misc_feature (1)..( 9): Result.006 file - promoters50/4773134
tatttttgt

SEQ ID NO: 193405 - DNA, 9 bp, Unknown
  misc_feature (1)..( 9): Result.006 file - promoters50/4773134
tatatgatt

SEQ ID NO: 193406 - DNA, 8 bp, Unknown
  misc_feature (1)..( 8): Result.006 file - promoters50/4773134
tattgttt

SEQ ID NO: 193407 - DNA, 8 bp, Unknown
  misc_feature (1)..( 8): Result.006 file - promoters50/4773134
tatttttt

SEQ ID NO: 193408 - DNA, 8 bp, Unknown
  misc_feature (1)..( 8): Result.006 file - promoters50/4773134
aatttttg

SEQ ID NO: 193409 - DNA, 8 bp, Unknown
  misc_feature (1)..( 8): Result.006 file - promoters50/4773134
cttaaaca

SEQ ID NO: 193410 - DNA, 8 bp, Unknown
  misc_feature (1)..( 8): Result.006 file - promoters50/4773134
attacaca

SEQ ID NO: 193411 - DNA, 8 bp, Unknown
  misc_feature (1)..( 8): Result.006 file - promoters50/4773142
attacaat

SEQ ID NO: 193412 - DNA, 9 bp, Unknown
  misc_feature (1)..( 9): Result.006 file - promoters50/4773142
ggttataaa

SEQ ID NO: 193413 - DNA, 9 bp, Unknown
  misc_feature (1)..( 9): Result.006 file - promoters50/4773142
ggttgtaaa

SEQ ID NO: 193414 - DNA, 9 bp, Unknown
  misc_feature (1)..( 9): Result.006 file - promoters50/4773142
ttttataac

SEQ ID NO: 193415 - DNA, 15 bp, Unknown
  misc_feature (1)..( 15): Result.006 file - promoters50/4773142
aaatacaaaatccag

SEQ ID NO: 193416 - DNA, 15 bp, Unknown
  misc_feature (1)..( 15): Result.006 file - promoters50/4773142
aaacacataatgttt

SEQ ID NO: 193417 - DNA, 15 bp, Unknown
  misc_feature (1)..( 15): Result.006 file - promoters50/4773182
gttccaataattttt

SEQ ID NO: 193418 - DNA, 11 bp, Unknown
  misc_feature (1)..( 11): Result.006 file - promoters50/4773182
aattttaaatt

SEQ ID NO: 193419 - DNA, 11 bp, Unknown
  misc_feature (1)..( 11): Result.006 file - promoters50/4773182
aatattacatc

SEQ ID NO: 193420 - DNA, 11 bp, Unknown
  misc_feature (1)..( 11): Result.006 file - promoters50/4773182
aattctaaaat

SEQ ID NO: 193421 - DNA, 11 bp, Unknown
  misc_feature (1)..( 11): Result.006 file - promoters50/4773182
ggtttcaaaat

SEQ ID NO: 193422 - DNA, 11 bp, Unknown
  misc_feature (1)..( 11): Result.006 file - promoters50/4773182
attttcaacac

SEQ ID NO: 193423 - DNA, 11 bp, Unknown
  misc_feature (1)..( 11): Result.006 file - promoters50/4773182
atctttaaaaa

SEQ ID NO: 193424 - DNA, 13 bp, Unknown
  misc_feature (1)..( 13): Result.006 file - promoters50/4773182
tttaaattacaaa

SEQ ID NO: 193425 - DNA, 13 bp, Unknown
  misc_feature (1)..( 13): Result.006 file - promoters50/4773182
attaaattattcc

SEQ ID NO: 193426 - DNA, 13 bp, Unknown
  misc_feature (1)..( 13): Result.006 file - promoters50/4773182
tatgaattctaaa

SEQ ID NO: 193427 - DNA, 13 bp, Unknown
  misc_feature (1)..( 13): Result.006 file - promoters50/4773182
tttcaaaatcact

SEQ ID NO: 193428 - DNA, 13 bp, Unknown
  misc_feature (1)..( 13): Result.006 file - promoters50/4773182
tttcaacacgaat

SEQ ID NO: 193429 - DNA, 13 bp, Unknown
  misc_feature (1)..( 13): Result.006 file - promoters50/4773185
tttaaaaacaaaa

SEQ ID NO: 193430 - DNA, 10 bp, Unknown
  misc_feature (1)..( 10): Result.006 file - promoters50/4773185
tatatttaat

SEQ ID NO: 193431 - DNA, 10 bp, Unknown
  misc_feature (1)..( 10): Result.006 file - promoters50/4773185
aataattata

SEQ ID NO: 193432 - DNA, 10 bp, Unknown
  misc_feature (1)..( 10): Result.006 file - promoters50/4773185
catattttta

SEQ ID NO: 193433 - DNA, 10 bp, Unknown
  misc_feature (1)..( 10): Result.006 file - promoters50/4773185
tgtatttaga

SEQ ID NO: 193434 - DNA, 10 bp, Unknown
  misc_feature (1)..( 10): Result.006 file - promoters50/4773185
attattgaga

SEQ ID NO: 193435 - DNA, 10 bp, Unknown
  misc_feature (1)..( 10): Result.006 file - promoters50/4773185
accaatcata

SEQ ID NO: 193436 - DNA, 10 bp, Unknown
  misc_feature (1)..( 10): Result.006 file - promoters50/4773185
aataatctca

SEQ ID NO: 193437 - DNA, 10 bp, Unknown
  misc_feature (1)..( 10): Result.006 file - promoters50/4773185
aatactttat

SEQ ID NO: 193438 - DNA, 9 bp, Unknown
  misc_feature (1)..( 9): Result.006 file - promoters50/4773185
aatcagaaa

SEQ ID NO: 193439 - DNA, 9 bp, Unknown
  misc_feature (1)..( 9): Result.006 file - promoters50/4773185
aatcataaa

SEQ ID NO: 193440 - DNA, 9 bp, Unknown
  misc_feature (1)..( 9): Result.006 file - promoters50/4773185
aattatata

SEQ ID NO: 193441 - DNA, 9 bp, Unknown
  misc_feature (1)..( 9): Result.006 file - promoters50/4773185
tattttata

SEQ ID NO: 193442 - DNA, 9 bp, Unknown
  misc_feature (1)..( 9): Result.006 file - promoters50/4773185
aataataaa

SEQ ID NO: 193443 - DNA, 9 bp, Unknown
  misc_feature (1)..( 9): Result.006 file - promoters50/4773185
catcatagt

SEQ ID NO: 193444 - DNA, 9 bp, Unknown
  misc_feature (1)..( 9): Result.006 file - promoters50/4773185
tatttttat

SEQ ID NO: 193445 - DNA, 14 bp, Unknown
  misc_feature (1)..( 14): Result.006 file - promoters50/4773185
cagttttgaattca

SEQ ID NO: 193446 - DNA, 14 bp, Unknown
  misc_feature (1)..( 14): Result.006 file - promoters50/4773185
attattttaatttt

SEQ ID NO: 193447 - DNA, 14 bp, Unknown
  misc_feature (1)..( 14): Result.006 file - promoters50/4773185
tggttcctaatttg

SEQ ID NO: 193448 - DNA, 14 bp, Unknown
  misc_feature (1)..( 14): Result.006 file - promoters50/4773185
cacaacctaatttc

SEQ ID NO: 193449 - DNA, 14 bp, Unknown
  misc_feature (1)..( 14): Result.006 file - promoters50/4773185
caattcgtaattat

SEQ ID NO: 193450 - DNA, 14 bp, Unknown
  misc_feature (1)..( 14): Result.006 file - promoters50/4773185
tacaacttatttta

SEQ ID NO: 193451 - DNA, 14 bp, Unknown
  misc_feature (1)..( 14): Result.006 file - promoters50/4773185
atttttttaaaaat

SEQ ID NO: 193452 - DNA, 12 bp, Unknown
  misc_feature (1)..( 12): Result.006 file - promoters50/4773185
aaataattggtt

SEQ ID NO: 193453 - DNA, 12 bp, Unknown
  misc_feature (1)..( 12): Result.006 file - promoters50/4773185
taatcattatct

SEQ ID NO: 193454 - DNA, 12 bp, Unknown
  misc_feature (1)..( 12): Result.006 file - promoters50/4773185
aaattattttaa

SEQ ID NO: 193455 - DNA, 12 bp, Unknown
  misc_feature (1)..( 12): Result.006 file - promoters50/4773185
aacttattttat

SEQ ID NO: 193456 - DNA, 12 bp, Unknown
  misc_feature (1)..( 12): Result.006 file - promoters50/4773185
agatttttttaa

SEQ ID NO: 193457 - DNA, 12 bp, Unknown
  misc_feature (1)..( 12): Result.006 file - promoters50/4773185
taattattcaca

SEQ ID NO: 193458 - DNA, 15 bp, Unknown
  misc_feature (1)..( 15): Result.006 file - promoters50/4773185
tacatattgagttaa

SEQ ID NO: 193459 - DNA, 15 bp, Unknown
  misc_feature (1)..( 15): Result.006 file - promoters50/4773185
acaaaaatgaattaa

SEQ ID NO: 193460 - DNA, 15 bp, Unknown
  misc_feature (1)..( 15): Result.006 file - promoters50/4773185
caacacttgaatttt

SEQ ID NO: 193461 - DNA, 15 bp, Unknown
  misc_feature (1)..( 15): Result.006 file - promoters50/4773185
acaaaattgaatcta

SEQ ID NO: 193462 - DNA, 15 bp, Unknown
  misc_feature (1)..( 15): Result.006 file - promoters50/4773185
acaaaagcacttcgc

SEQ ID NO: 193463 - DNA, 15 bp, Unknown
  misc_feature (1)..( 15): Result.006 file - promoters50/4773185
tagtgacaaaattaa

SEQ ID NO: 193464 - DNA, 11 bp, Unknown
  misc_feature (1)..( 11): Result.006 file - promoters50/4773185
gatttctaata

SEQ ID NO: 193465 - DNA, 11 bp, Unknown
  misc_feature (1)..( 11): Result.006 file - promoters50/4773185
attttataata

SEQ ID NO: 193466 - DNA, 11 bp, Unknown
  misc_feature (1)..( 11): Result.006 file - promoters50/4773185
tttttataaat

SEQ ID NO: 193467 - DNA, 11 bp, Unknown
  misc_feature (1)..( 11): Result.006 file - promoters50/4773185
attttataggt

SEQ ID NO: 193468 - DNA, 11 bp, Unknown
  misc_feature (1)..( 11): Result.006 file - promoters50/4773185
tttttttaaca

SEQ ID NO: 193469 - DNA, 11 bp, Unknown
  misc_feature (1)..( 11): Result.006 file - promoters50/4773205
atcaaataata

SEQ ID NO: 193470 - DNA, 8 bp, Unknown
  misc_feature (1)..( 8): Result.006 file - promoters50/4773205
gatggtta

SEQ ID NO: 193471 - DNA, 8 bp, Unknown
  misc_feature (1)..( 8): Result.006 file - promoters50/4773205
aatggttc

SEQ ID NO: 193472 - DNA, 8 bp, Unknown
  misc_feature (1)..( 8): Result.006 file - promoters50/4773205
gattgtta

SEQ ID NO: 193473 - DNA, 8 bp, Unknown
  misc_feature (1)..( 8): Result.006 file - promoters50/4773205
taaaaaga

SEQ ID NO: 193474 - DNA, 8 bp, Unknown
  misc_feature (1)..( 8): Result.006 file - promoters50/4773205
taaaaatt

SEQ ID NO: 193475 - DNA, 8 bp, Unknown
  misc_feature (1)..( 8): Result.006 file - promoters50/4773205
taaacaga

SEQ ID NO: 193476 - DNA, 8 bp, Unknown
  misc_feature (1)..( 8): Result.006 file - promoters50/4773205
ttctttct

SEQ ID NO: 193477 - DNA, 8 bp, Unknown
  misc_feature (1)..( 8): Result.006 file - promoters50/4773205
ttctctct

SEQ ID NO: 193478 - DNA, 8 bp, Unknown
  misc_feature (1)..( 8): Result.006 file - promoters50/4773205
ctctctct

SEQ ID NO: 193479 - DNA, 11 bp, Unknown
  misc_feature (1)..( 11): Result.006 file - promoters50/4773205
ataaataatta

SEQ ID NO: 193480 - DNA, 11 bp, Unknown
  misc_feature (1)..( 11): Result.006 file - promoters50/4773205
gtagatattta

SEQ ID NO: 193481 - DNA, 11 bp, Unknown
  misc_feature (1)..( 11): Result.006 file - promoters50/4773205
aatgataatac

SEQ ID NO: 193482 - DNA, 10 bp, Unknown
  misc_feature (1)..( 10): Result.006 file - promoters50/4773205
aaaacaattt

SEQ ID NO: 193483 - DNA, 10 bp, Unknown
  misc_feature (1)..( 10): Result.006 file - promoters50/4773205
aaaacagttt

SEQ ID NO: 193484 - DNA, 10 bp, Unknown
  misc_feature (1)..( 10): Result.006 file - promoters50/4773205
aaaacaacaa

SEQ ID NO: 193485 - DNA, 7 bp, Unknown
  misc_feature (1)..( 7): Result.006 file - promoters50/4773205
gatcact

SEQ ID NO: 193486 - DNA, 7 bp, Unknown
  misc_feature (1)..( 7): Result.006 file - promoters50/4773205
gatgact

SEQ ID NO: 193487 - DNA, 7 bp, Unknown
  misc_feature (1)..( 7): Result.006 file - promoters50/4773225
gataact

SEQ ID NO: 193488 - DNA, 9 bp, Unknown
  misc_feature (1)..( 9): Result.006 file - promoters50/4773225
atttagaca

SEQ ID NO: 193489 - DNA, 9 bp, Unknown
  misc_feature (1)..( 9): Result.006 file - promoters50/4773225
atttagctt

SEQ ID NO: 193490 - DNA, 9 bp, Unknown
  misc_feature (1)..( 9): Result.006 file - promoters50/4773225
ttttatctt

SEQ ID NO: 193491 - DNA, 7 bp, Unknown
  misc_feature (1)..( 7): Result.006 file - promoters50/4773225
ctgaaaa

SEQ ID NO: 193492 - DNA, 7 bp, Unknown
  misc_feature (1)..( 7): Result.006 file - promoters50/4773225
atgaaaa

SEQ ID NO: 193493 - DNA, 7 bp, Unknown
  misc_feature (1)..( 7): Result.006 file - promoters50/4773225
ctgaaag

SEQ ID NO: 193494 - DNA, 9 bp, Unknown
  misc_feature (1)..( 9): Result.006 file - promoters50/4773225
aaacaataa

SEQ ID NO: 193495 - DNA, 9 bp, Unknown
  misc_feature (1)..( 9): Result.006 file - promoters50/4773225
aaaaaataa

SEQ ID NO: 193496 - DNA, 9 bp, Unknown
  misc_feature (1)..( 9): Result.006 file - promoters50/4773249
aaagaatat

SEQ ID NO: 193497 - DNA, 8 bp, Unknown
  misc_feature (1)..( 8): Result.006 file - promoters50/4773249
tgtcaatg

SEQ ID NO: 193498 - DNA, 8 bp, Unknown
  misc_feature (1)..( 8): Result.006 file - promoters50/4773249
tttcaatg

SEQ ID NO: 193499 - DNA, 8 bp, Unknown
  misc_feature (1)..( 8): Result.006 file - promoters50/4773299
tttcaata

SEQ ID NO: 193500 - DNA, 8 bp, Unknown
  misc_feature (1)..( 8): Result.006 file - promoters50/4773299
ttctgctt

SEQ ID NO: 193501 - DNA, 8 bp, Unknown
  misc_feature (1)..( 8): Result.006 file - promoters50/4773299
ctcttctt

SEQ ID NO: 193502 - DNA, 8 bp, Unknown
  misc_feature (1)..( 8): Result.006 file - promoters50/4773299
atcttctt

SEQ ID NO: 193503 - DNA, 8 bp, Unknown
  misc_feature (1)..( 8): Result.006 file - promoters50/4773299
atcttcta

SEQ ID NO: 193504 - DNA, 16 bp, Unknown
  misc_feature (1)..( 16): Result.006 file - promoters50/4773299
aagaagctaaccttga

SEQ ID NO: 193505 - DNA, 16 bp, Unknown
  misc_feature (1)..( 16): Result.006 file - promoters50/4773299
gtatgattaagcttgt

SEQ ID NO: 193506 - DNA, 16 bp, Unknown
  misc_feature (1)..( 16): Result.006 file - promoters50/4773299
ctgacaaggaccttga

SEQ ID NO: 193507 - DNA, 16 bp, Unknown
  misc_feature (1)..( 16): Result.006 file - promoters50/4773323
gtatggttatgctacg

SEQ ID NO: 193508 - DNA, 7 bp, Unknown
  misc_feature (1)..( 7): Result.006 file - promoters50/4773323
tttaatt

SEQ ID NO: 193509 - DNA, 7 bp, Unknown
  misc_feature (1)..( 7): Result.006 file - promoters50/4773323
tttaata

SEQ ID NO: 193510 - DNA, 7 bp, Unknown
  misc_feature (1)..( 7): Result.006 file - promoters50/4773323
attaata

SEQ ID NO: 193511 - DNA, 7 bp, Unknown
  misc_feature (1)..( 7): Result.006 file - promoters50/4773323
atttata

SEQ ID NO: 193512 - DNA, 7 bp, Unknown
  misc_feature (1)..( 7): Result.006 file - promoters50/4773323
attaata

SEQ ID NO: 193513 - DNA, 7 bp, Unknown
  misc_feature (1)..( 7): Result.006 file - promoters50/4773331
tttaata

SEQ ID NO: 193514 - DNA, 9 bp, Unknown
  misc_feature (1)..( 9): Result.006 file - promoters50/4773331
ctctcaaat

SEQ ID NO: 193515 - DNA, 9 bp, Unknown
  misc_feature (1)..( 9): Result.006 file - promoters50/4773331
taatcaaat

SEQ ID NO: 193516 - DNA, 9 bp, Unknown
  misc_feature (1)..( 9): Result.006 file - promoters50/4773331
taatgaaac

SEQ ID NO: 193517 - DNA, 9 bp, Unknown
  misc_feature (1)..( 9): Result.006 file - promoters50/4773331
gattcaaat

SEQ ID NO: 193518 - DNA, 9 bp, Unknown
  misc_feature (1)..( 9): Result.006 file - promoters50/4773331
caataaaag

SEQ ID NO: 193519 - DNA, 9 bp, Unknown
  misc_feature (1)..( 9): Result.006 file - promoters50/4773331
aaatgaagc

SEQ ID NO: 193520 - DNA, 9 bp, Unknown
  misc_feature (1)..( 9): Result.006 file - promoters50/4773331
taataaagt

SEQ ID NO: 193521 - DNA, 18 bp, Unknown
  misc_feature (1)..( 18): Result.006 file - promoters50/4773331
acagagacaaaacaatga

SEQ ID NO: 193522 - DNA, 18 bp, Unknown
  misc_feature (1)..( 18): Result.006 file - promoters50/4773331
ctcaagagaaaatttgat

SEQ ID NO: 193523 - DNA, 18 bp, Unknown
  misc_feature (1)..( 18): Result.006 file - promoters50/4773331
atctccacaaaacatcct

SEQ ID NO: 193524 - DNA, 18 bp, Unknown
  misc_feature (1)..( 18): Result.006 file - promoters50/4773331
acagggacagtcgaagtt

SEQ ID NO: 193525 - DNA, 18 bp, Unknown
  misc_feature (1)..( 18): Result.006 file - promoters50/4773331
aagctaagaacattggat

SEQ ID NO: 193526 - DNA, 18 bp, Unknown
  misc_feature (1)..( 18): Result.006 file - promoters50/4773331
gcatagagaatacaatcc

SEQ ID NO: 193527 - DNA, 18 bp, Unknown
  misc_feature (1)..( 18): Result.006 file - promoters50/4773331
agtcatagaaaaattaaa

SEQ ID NO: 193528 - DNA, 9 bp, Unknown
  misc_feature (1)..( 9): Result.006 file - promoters50/4773331
caaaggaag

SEQ ID NO: 193529 - DNA, 9 bp, Unknown
  misc_feature (1)..( 9): Result.006 file - promoters50/4773331
gaaacgaac

SEQ ID NO: 193530 - DNA, 9 bp, Unknown
  misc_feature (1)..( 9): Result.006 file - promoters50/4773331
gaaatgaag

SEQ ID NO: 193531 - DNA, 9 bp, Unknown
  misc_feature (1)..( 9): Result.006 file - promoters50/4773331
aggaggaag

SEQ ID NO: 193532 - DNA, 9 bp, Unknown
  misc_feature (1)..( 9): Result.006 file - promoters50/4773331
ttaataaag

SEQ ID NO: 193533 - DNA, 9 bp, Unknown
  misc_feature (1)..( 9): Result.006 file - promoters50/4773351
gaaatggcc

SEQ ID NO: 193534 - DNA, 8 bp, Unknown
  misc_feature (1)..( 8): Result.006 file - promoters50/4773351
acaaagag

SEQ ID NO: 193535 - DNA, 8 bp, Unknown
  misc_feature (1)..( 8): Result.006 file - promoters50/4773351
ataaagag

SEQ ID NO: 193536 - DNA, 8 bp, Unknown
  misc_feature (1)..( 8): Result.006 file - promoters50/4773355
ataaagaa

SEQ ID NO: 193537 - DNA, 11 bp, Unknown
  misc_feature (1)..( 11): Result.006 file - promoters50/4773355
ctaatttgaac

SEQ ID NO: 193538 - DNA, 11 bp, Unknown
  misc_feature (1)..( 11): Result.006 file - promoters50/4773355
ttacttttaac

SEQ ID NO: 193539 - DNA, 11 bp, Unknown
  misc_feature (1)..( 11): Result.006 file - promoters50/4773355
ttacttttatt

SEQ ID NO: 193540 - DNA, 11 bp, Unknown
  misc_feature (1)..( 11): Result.006 file - promoters50/4773355
gatcttttaat

SEQ ID NO: 193541 - DNA, 11 bp, Unknown
  misc_feature (1)..( 11): Result.006 file - promoters50/4773355
tgggttttaca

SEQ ID NO: 193542 - DNA, 11 bp, Unknown
  misc_feature (1)..( 11): Result.006 file - promoters50/4773384
cgacttttcac

SEQ ID NO: 193543 - DNA, 9 bp, Unknown
  misc_feature (1)..( 9): Result.006 file - promoters50/4773384
cgtaaaaga

SEQ ID NO: 193544 - DNA, 9 bp, Unknown
  misc_feature (1)..( 9): Result.006 file - promoters50/4773384
agaaaaaga

SEQ ID NO: 193545 - DNA, 9 bp, Unknown
  misc_feature (1)..( 9): Result.006 file - promoters50/4773384
agataaagt

SEQ ID NO: 193546 - DNA, 8 bp, Unknown
  misc_feature (1)..( 8): Result.006 file - promoters50/4773384
aaattata

SEQ ID NO: 193547 - DNA, 8 bp, Unknown
  misc_feature (1)..( 8): Result.006 file - promoters50/4773384
aaataata

SEQ ID NO: 193548 - DNA, 8 bp, Unknown
  misc_feature (1)..( 8): Result.006 file - promoters50/4773384
aaaaaata

SEQ ID NO: 193549 - DNA, 9 bp, Unknown
  misc_feature (1)..( 9): Result.006 file - promoters50/4773384
taatttatt

SEQ ID NO: 193550 - DNA, 9 bp, Unknown
  misc_feature (1)..( 9): Result.006 file - promoters50/4773384
taatttaga

SEQ ID NO: 193551 - DNA, 9 bp, Unknown
  misc_feature (1)..( 9): Result.006 file - promoters50/4773384
taatatatt

SEQ ID NO: 193552 - DNA, 7 bp, Unknown
  misc_feature (1)..( 7): Result.006 file - promoters50/4773384
tttcaat

SEQ ID NO: 193553 - DNA, 7 bp, Unknown
  misc_feature (1)..( 7): Result.006 file - promoters50/4773384
tttcaaa

SEQ ID NO: 193554 - DNA, 7 bp, Unknown
  misc_feature (1)..( 7): Result.006 file - promoters50/4773384
tttaaat

SEQ ID NO: 193555 - DNA, 8 bp, Unknown
  misc_feature (1)..( 8): Result.006 file - promoters50/4773384
acacattt

SEQ ID NO: 193556 - DNA, 8 bp, Unknown
  misc_feature (1)..( 8): Result.006 file - promoters50/4773384
acatatta

SEQ ID NO: 193557 - DNA, 8 bp, Unknown
  misc_feature (1)..( 8): Result.006 file - promoters50/4773384
gcatatta

SEQ ID NO: 193558 - DNA, 7 bp, Unknown
  misc_feature (1)..( 7): Result.006 file - promoters50/4773384
caagaaa

SEQ ID NO: 193559 - DNA, 7 bp, Unknown
  misc_feature (1)..( 7): Result.006 file - promoters50/4773384
taagaaa

SEQ ID NO: 193560 - DNA, 7 bp, Unknown
  misc_feature (1)..( 7): Result.006 file - promoters50/4773384
taacaaa

SEQ ID NO: 193561 - DNA, 7 bp, Unknown
  misc_feature (1)..( 7): Result.006 file - promoters50/4773384
catctta

SEQ ID NO: 193562 - DNA, 7 bp, Unknown
  misc_feature (1)..( 7): Result.006 file - promoters50/4773384
catatta

SEQ ID NO: 193563 - DNA, 7 bp, Unknown
  misc_feature (1)..( 7): Result.006 file - promoters50/4773384
catatta

SEQ ID NO: 193564 - DNA, 8 bp, Unknown
  misc_feature (1)..( 8): Result.006 file - promoters50/4773384
caacgaaa

SEQ ID NO: 193565 - DNA, 8 bp, Unknown
  misc_feature (1)..( 8): Result.006 file - promoters50/4773384
gaacaaaa

SEQ ID NO: 193566 - DNA, 8 bp, Unknown
  misc_feature (1)..( 8): Result.006 file - promoters50/4773384
gaaaaaaa

SEQ ID NO: 193567 - DNA, 7 bp, Unknown
  misc_feature (1)..( 7): Result.006 file - promoters50/4773384
attatta

SEQ ID NO: 193568 - DNA, 7 bp, Unknown
  misc_feature (1)..( 7): Result.006 file - promoters50/4773384
tttatta

SEQ ID NO: 193569 - DNA, 7 bp, Unknown
  misc_feature (1)..( 7): Result.006 file - promoters50/4773384
tttattt

SEQ ID NO: 193570 - DNA, 8 bp, Unknown
  misc_feature (1)..( 8): Result.006 file - promoters50/4773384
agaaaaat

SEQ ID NO: 193571 - DNA, 8 bp, Unknown
  misc_feature (1)..( 8): Result.006 file - promoters50/4773384
agaaaaaa

SEQ ID NO: 193572 - DNA, 9 bp, Unknown
  misc_feature (1)..( 9): Result.006 file - promoters50/4773392
ggaacaaaa

SEQ ID NO: 193573 - DNA, 14 bp, Unknown
  misc_feature (1)..( 14): Result.006 file - promoters50/4773392
ttggtaaaatattt

SEQ ID NO: 193574 - DNA, 14 bp, Unknown
  misc_feature (1)..( 14): Result.006 file - promoters50/4773392
aaacaaaaataaat

SEQ ID NO: 193575 - DNA, 14 bp, Unknown
  misc_feature (1)..( 14): Result.006 file - promoters50/4773400
taaacaaaaaaaaa

SEQ ID NO: 193576 - DNA, 10 bp, Unknown
  misc_feature (1)..( 10): Result.006 file - promoters50/4773400
gttttaaaac

SEQ ID NO: 193577 - DNA, 10 bp, Unknown
  misc_feature (1)..( 10): Result.006 file - promoters50/4773400
gaagtaaaac

SEQ ID NO: 193578 - DNA, 10 bp, Unknown
  misc_feature (1)..( 10): Result.006 file - promoters50/4773400
gaaataaaat

SEQ ID NO: 193579 - DNA, 7 bp, Unknown
  misc_feature (1)..( 7): Result.006 file - promoters50/4773400
tatatgc

SEQ ID NO: 193580 - DNA, 7 bp, Unknown
  misc_feature (1)..( 7): Result.006 file - promoters50/4773400
tatttgc

SEQ ID NO: 193581 - DNA, 7 bp, Unknown
  misc_feature (1)..( 7): Result.006 file - promoters50/4773793
ttttttt

SEQ ID NO: 193582 - DNA, 8 bp, Unknown
  misc_feature (1)..( 8): Result.006 file - promoters50/4773793
tataggat

SEQ ID NO: 193583 - DNA, 8 bp, Unknown
  misc_feature (1)..( 8): Result.006 file - promoters50/4773793
aataagat

SEQ ID NO: 193584 - DNA, 8 bp, Unknown
  misc_feature (1)..( 8): Result.006 file - promoters50/4773795
aataagtt

SEQ ID NO: 193585 - DNA, 10 bp, Unknown
  misc_feature (1)..( 10): Result.006 file - promoters50/4773795
ttttaatttt

SEQ ID NO: 193586 - DNA, 10 bp, Unknown
  misc_feature (1)..( 10): Result.006 file - promoters50/4773795
atttgatttt

SEQ ID NO: 193587 - DNA, 11 bp, Unknown
  misc_feature (1)..( 11): Result.006 file - promoters50/4773819
attataatatt

SEQ ID NO: 193588 - DNA, 11 bp, Unknown
  misc_feature (1)..( 11): Result.006 file - promoters50/4773819
aagataattaa

SEQ ID NO: 193589 - DNA, 11 bp, Unknown
  misc_feature (1)..( 11): Result.006 file - promoters50/4773819
aaggtaatctc

SEQ ID NO: 193590 - DNA, 11 bp, Unknown
  misc_feature (1)..( 11): Result.006 file - promoters50/4773819
cagagaatttt

SEQ ID NO: 193591 - DNA, 11 bp, Unknown
  misc_feature (1)..( 11): Result.006 file - promoters50/4773819
tagatatttaa

SEQ ID NO: 193592 - DNA, 9 bp, Unknown
  misc_feature (1)..( 9): Result.006 file - promoters50/4773819
gatttttct

SEQ ID NO: 193593 - DNA, 11 bp, Unknown
  misc_feature (1)..( 11): Result.006 file - promoters50/4773819
atacaatttaa

SEQ ID NO: 193594 - DNA, 11 bp, Unknown
  misc_feature (1)..( 11): Result.006 file - promoters50/4773819
tagacattgat

SEQ ID NO: 193595 - DNA, 13 bp, Unknown
  misc_feature (1)..( 13): Result.006 file - promoters50/4773819
ttggtgaaagagt

SEQ ID NO: 193596 - DNA, 13 bp, Unknown
  misc_feature (1)..( 13): Result.006 file - promoters50/4773819
cttgaaaaagaga

SEQ ID NO: 193597 - DNA, 13 bp, Unknown
  misc_feature (1)..( 13): Result.006 file - promoters50/4773819
ttgatgaatgagg

SEQ ID NO: 193598 - DNA, 13 bp, Unknown
  misc_feature (1)..( 13): Result.006 file - promoters50/4773819
gggtataaaaaga

SEQ ID NO: 193599 - DNA, 13 bp, Unknown
  misc_feature (1)..( 13): Result.006 file - promoters50/4773819
tatatcaaaattt

SEQ ID NO: 193600 - DNA, 13 bp, Unknown
  misc_feature (1)..( 13): Result.006 file - promoters50/4773819
tgtctcaaaatgt

SEQ ID NO: 193601 - DNA, 13 bp, Unknown
  misc_feature (1)..( 13): Result.006 file - promoters50/4773819
agtatctaaacgc

SEQ ID NO: 193602 - DNA, 9 bp, Unknown
  misc_feature (1)..( 9): Result.006 file - promoters50/4773819
gattctttg

SEQ ID NO: 193603 - DNA, 9 bp, Unknown
  misc_feature (1)..( 9): Result.006 file - promoters50/4773819
tcttctttt

SEQ ID NO: 193604 - DNA, 9 bp, Unknown
  misc_feature (1)..( 9): Result.006 file - promoters50/4773819
gatgctttt

SEQ ID NO: 193605 - DNA, 10 bp, Unknown
  misc_feature (1)..( 10): Result.006 file - promoters50/4773819
ggttcatttc

SEQ ID NO: 193606 - DNA, 10 bp, Unknown
  misc_feature (1)..( 10): Result.006 file - promoters50/4773819
tatgatttag

SEQ ID NO: 193607 - DNA, 10 bp, Unknown
  misc_feature (1)..( 10): Result.006 file - promoters50/4773823
gatatagaaa

SEQ ID NO: 193608 - DNA, 10 bp, Unknown
  misc_feature (1)..( 10): Result.006 file - promoters50/4773823
taaaaaccag

SEQ ID NO: 193609 - DNA, 10 bp, Unknown
  misc_feature (1)..( 10): Result.006 file - promoters50/4773823
taaaaacgaa

SEQ ID NO: 193610 - DNA, 10 bp, Unknown
  misc_feature (1)..( 10): Result.006 file - promoters50/4773823
taaaaacaat

SEQ ID NO: 193611 - DNA, 10 bp, Unknown
  misc_feature (1)..( 10): Result.006 file - promoters50/4773823
taaaaattaa

SEQ ID NO: 193612 - DNA, 10 bp, Unknown
  misc_feature (1)..( 10): Result.006 file - promoters50/4773823
aaaaaaaaat

SEQ ID NO: 193613 - DNA, 10 bp, Unknown
  misc_feature (1)..( 10): Result.006 file - promoters50/4773836
atcaaaccaa

SEQ ID NO: 193614 - DNA, 9 bp, Unknown
  misc_feature (1)..( 9): Result.006 file - promoters50/4773836
atttatcgc

SEQ ID NO: 193615 - DNA, 9 bp, Unknown
  misc_feature (1)..( 9): Result.006 file - promoters50/4773836
atttatcat

SEQ ID NO: 193616 - DNA, 9 bp, Unknown
  misc_feature (1)..( 9): Result.006 file - promoters50/4773836
ttttatcat

SEQ ID NO: 193617 - DNA, 9 bp, Unknown
  misc_feature (1)..( 9): Result.006 file - promoters50/4773836
gtcaaatcc

SEQ ID NO: 193618 - DNA, 9 bp, Unknown
  misc_feature (1)..( 9): Result.006 file - promoters50/4773836
gtcaaaaaa

SEQ ID NO: 193619 - DNA, 9 bp, Unknown
  misc_feature (1)..( 9): Result.006 file - promoters50/4773846
ctcaaaaaa

SEQ ID NO: 193620 - DNA, 10 bp, Unknown
  misc_feature (1)..( 10): Result.006 file - promoters50/4773846
tattaaaaaa

SEQ ID NO: 193621 - DNA, 10 bp, Unknown
  misc_feature (1)..( 10): Result.006 file - promoters50/4773846
tattaaaaaa

SEQ ID NO: 193622 - DNA, 10 bp, Unknown
  misc_feature (1)..( 10): Result.006 file - promoters50/4773846
tatgaaattc

SEQ ID NO: 193623 - DNA, 10 bp, Unknown
  misc_feature (1)..( 10): Result.006 file - promoters50/4773846
gatgaaaaaa

SEQ ID NO: 193624 - DNA, 9 bp, Unknown
  misc_feature (1)..( 9): Result.006 file - promoters50/4773846
atatatttt

SEQ ID NO: 193625 - DNA, 9 bp, Unknown
  misc_feature (1)..( 9): Result.006 file - promoters50/4773846
ttatattgt

SEQ ID NO: 193626 - DNA, 9 bp, Unknown
  misc_feature (1)..( 9): Result.006 file - promoters50/4773846
ttatctttt

SEQ ID NO: 193627 - DNA, 9 bp, Unknown
  misc_feature (1)..( 9): Result.006 file - promoters50/4773846
atatatttt

SEQ ID NO: 193628 - DNA, 8 bp, Unknown
  misc_feature (1)..( 8): Result.006 file - promoters50/4773846
aatacaac

SEQ ID NO: 193629 - DNA, 8 bp, Unknown
  misc_feature (1)..( 8): Result.006 file - promoters50/4773846
tatagaac

SEQ ID NO: 193630 - DNA, 8 bp, Unknown
  misc_feature (1)..( 8): Result.006 file - promoters50/4773846
aattcaaa

SEQ ID NO: 193631 - DNA, 8 bp, Unknown
  misc_feature (1)..( 8): Result.006 file - promoters50/4773846
aattaaaa

SEQ ID NO: 193632 - DNA, 9 bp, Unknown
  misc_feature (1)..( 9): Result.006 file - promoters50/4773846
atttgatct

SEQ ID NO: 193633 - DNA, 9 bp, Unknown
  misc_feature (1)..( 9): Result.006 file - promoters50/4773846
attttatct

SEQ ID NO: 193634 - DNA, 9 bp, Unknown
  misc_feature (1)..( 9): Result.006 file - promoters50/4773846
tttttataa

SEQ ID NO: 193635 - DNA, 9 bp, Unknown
  misc_feature (1)..( 9): Result.006 file - promoters50/4773846
attttaggt

SEQ ID NO: 193636 - DNA, 7 bp, Unknown
  misc_feature (1)..( 7): Result.006 file - promoters50/4773846
acagcaa

SEQ ID NO: 193637 - DNA, 7 bp, Unknown
  misc_feature (1)..( 7): Result.006 file - promoters50/4773846
tcagcaa

SEQ ID NO: 193638 - DNA, 7 bp, Unknown
  misc_feature (1)..( 7): Result.006 file - promoters50/4773846
acagcat

SEQ ID NO: 193639 - DNA, 8 bp, Unknown
  misc_feature (1)..( 8): Result.006 file - promoters50/4773846
aatcaaat

SEQ ID NO: 193640 - DNA, 8 bp, Unknown
  misc_feature (1)..( 8): Result.006 file - promoters50/4773846
aattaaaa

SEQ ID NO: 193641 - DNA, 8 bp, Unknown
  misc_feature (1)..( 8): Result.006 file - promoters50/4773846
cattaaaa

SEQ ID NO: 193642 - DNA, 13 bp, Unknown
  misc_feature (1)..( 13): Result.006 file - promoters50/4773846
atttgatacttta

SEQ ID NO: 193643 - DNA, 13 bp, Unknown
  misc_feature (1)..( 13): Result.006 file - promoters50/4773846
attagataatttt

SEQ ID NO: 193644 - DNA, 13 bp, Unknown
  misc_feature (1)..( 13): Result.006 file - promoters50/4773846
agtgtatacatta

SEQ ID NO: 193645 - DNA, 8 bp, Unknown
  misc_feature (1)..( 8): Result.006 file - promoters50/4773846
attcaaag

SEQ ID NO: 193646 - DNA, 8 bp, Unknown
  misc_feature (1)..( 8): Result.006 file - promoters50/4773846
attcaaat

SEQ ID NO: 193647 - DNA, 8 bp, Unknown
  misc_feature (1)..( 8): Result.006 file - promoters50/4773846
tctcaaat

SEQ ID NO: 193648 - DNA, 9 bp, Unknown
  misc_feature (1)..( 9): Result.006 file - promoters50/4773846
aaattcaag

SEQ ID NO: 193649 - DNA, 9 bp, Unknown
  misc_feature (1)..( 9): Result.006 file - promoters50/4773846
aaattcaaa

SEQ ID NO: 193650 - DNA, 9 bp, Unknown
  misc_feature (1)..( 9): Result.006 file - promoters50/4773846
ttattaaaa

SEQ ID NO: 193651 - DNA, 9 bp, Unknown
  misc_feature (1)..( 9): Result.006 file - promoters50/4773846
ttgatttat

SEQ ID NO: 193652 - DNA, 9 bp, Unknown
  misc_feature (1)..( 9): Result.006 file - promoters50/4773846
aatatttat

SEQ ID NO: 193653 - DNA, 9 bp, Unknown
  misc_feature (1)..( 9): Result.006 file - promoters50/4773846
aataattat

SEQ ID NO: 193654 - DNA, 7 bp, Unknown
  misc_feature (1)..( 7): Result.006 file - promoters50/4773846
aaaaata

SEQ ID NO: 193655 - DNA, 7 bp, Unknown
  misc_feature (1)..( 7): Result.006 file - promoters50/4773846
aaagata

SEQ ID NO: 193656 - DNA, 7 bp, Unknown
  misc_feature (1)..( 7): Result.006 file - promoters50/4773846
aaagatg

SEQ ID NO: 193657 - DNA, 7 bp, Unknown
  misc_feature (1)..( 7): Result.006 file - promoters50/4773846
catctat

SEQ ID NO: 193658 - DNA, 7 bp, Unknown
  misc_feature (1)..( 7): Result.006 file - promoters50/4773846
tatctat

SEQ ID NO: 193659 - DNA, 7 bp, Unknown
  misc_feature (1)..( 7): Result.006 file - promoters50/4773846
tatatat

SEQ ID NO: 193660 - DNA, 8 bp, Unknown
  misc_feature (1)..( 8): Result.006 file - promoters50/4773846
taaatata

SEQ ID NO: 193661 - DNA, 8 bp, Unknown
  misc_feature (1)..( 8): Result.006 file - promoters50/4773846
taactata

SEQ ID NO: 193662 - DNA, 8 bp, Unknown
  misc_feature (1)..( 8): Result.006 file - promoters50/4773846
acactata

SEQ ID NO: 193663 - DNA, 10 bp, Unknown
  misc_feature (1)..( 10): Result.006 file - promoters50/4773846
atgcatgatg

SEQ ID NO: 193664 - DNA, 10 bp, Unknown
  misc_feature (1)..( 10): Result.006 file - promoters50/4773846
atgcatgtaa

SEQ ID NO: 193665 - DNA, 10 bp, Unknown
  misc_feature (1)..( 10): Result.006 file - promoters50/4773846
ttgcatttaa

SEQ ID NO: 193666 - DNA, 8 bp, Unknown
  misc_feature (1)..( 8): Result.006 file - promoters50/4773846
tgtaatat

SEQ ID NO: 193667 - DNA, 8 bp, Unknown
  misc_feature (1)..( 8): Result.006 file - promoters50/4773846
actaatat

SEQ ID NO: 193668 - DNA, 9 bp, Unknown
  misc_feature (1)..( 9): Result.006 file - promoters50/4773846
aataattat

SEQ ID NO: 193669 - DNA, 7 bp, Unknown
  misc_feature (1)..( 7): Result.006 file - promoters50/4773846
aattaag

SEQ ID NO: 193670 - DNA, 7 bp, Unknown
  misc_feature (1)..( 7): Result.006 file - promoters50/4773846
aattaaa

SEQ ID NO: 193671 - DNA, 8 bp, Unknown
  misc_feature (1)..( 8): Result.006 file - promoters50/4801635
aattcaaa

SEQ ID NO: 193672 - DNA, 12 bp, Unknown
  misc_feature (1)..( 12): Result.006 file - promoters50/4801635
aactgaaatttt

SEQ ID NO: 193673 - DNA, 12 bp, Unknown
  misc_feature (1)..( 12): Result.006 file - promoters50/4801635
aactcaaataac

SEQ ID NO: 193674 - DNA, 12 bp, Unknown
  misc_feature (1)..( 12): Result.006 file - promoters50/4801635
tgttgaattttt

SEQ ID NO: 193675 - DNA, 13 bp, Unknown
  misc_feature (1)..( 13): Result.006 file - promoters50/4801635
attttaggaaact

SEQ ID NO: 193676 - DNA, 13 bp, Unknown
  misc_feature (1)..( 13): Result.006 file - promoters50/4801635
caactagaaaact

SEQ ID NO: 193677 - DNA, 13 bp, Unknown
  misc_feature (1)..( 13): Result.006 file - promoters50/4801635
caactagaagaaa

SEQ ID NO: 193678 - DNA, 7 bp, Unknown
  misc_feature (1)..( 7): Result.006 file - promoters50/4801635
tgtattt

SEQ ID NO: 193679 - DNA, 7 bp, Unknown
  misc_feature (1)..( 7): Result.006 file - promoters50/4801635
tgttttt

SEQ ID NO: 193680 - DNA, 7 bp, Unknown
  misc_feature (1)..( 7): Result.006 file - promoters50/4801635
tgtattc

SEQ ID NO: 193681 - DNA, 9 bp, Unknown
  misc_feature (1)..( 9): Result.006 file - promoters50/4801635
tttgaaaca

SEQ ID NO: 193682 - DNA, 9 bp, Unknown
  misc_feature (1)..( 9): Result.006 file - promoters50/4801635
tttgcaaca

SEQ ID NO: 193683 - DNA, 9 bp, Unknown
  misc_feature (1)..( 9): Result.006 file - promoters50/4801635
tttgaaagg

SEQ ID NO: 193684 - DNA, 9 bp, Unknown
  misc_feature (1)..( 9): Result.006 file - promoters50/4801635
ttaagaact

SEQ ID NO: 193685 - DNA, 9 bp, Unknown
  misc_feature (1)..( 9): Result.006 file - promoters50/4801635
ttaagaaaa

SEQ ID NO: 193686 - DNA, 9 bp, Unknown
  misc_feature (1)..( 9): Result.006 file - promoters50/4801635
ttaacaaaa

SEQ ID NO: 193687 - DNA, 10 bp, Unknown
  misc_feature (1)..( 10): Result.006 file - promoters50/4801635
acaactgaaa

SEQ ID NO: 193688 - DNA, 10 bp, Unknown
  misc_feature (1)..( 10): Result.006 file - promoters50/4801635
acaactagaa

SEQ ID NO: 193689 - DNA, 10 bp, Unknown
  misc_feature (1)..( 10): Result.006 file - promoters50/4801635
tcaactagaa

SEQ ID NO: 193690 - DNA, 13 bp, Unknown
  misc_feature (1)..( 13): Result.006 file - promoters50/4801635
actttgacattat

SEQ ID NO: 193691 - DNA, 13 bp, Unknown
  misc_feature (1)..( 13): Result.006 file - promoters50/4801635
ataaaaccattat

SEQ ID NO: 193692 - DNA, 13 bp, Unknown
  misc_feature (1)..( 13): Result.006 file - promoters50/4801635
ataacaccgttaa

SEQ ID NO: 193693 - DNA, 13 bp, Unknown
  misc_feature (1)..( 13): Result.006 file - promoters50/4801635
gggtcacggttgt

SEQ ID NO: 193694 - DNA, 14 bp, Unknown
  misc_feature (1)..( 14): Result.006 file - promoters50/4801635
ctttttctcttctt

SEQ ID NO: 193695 - DNA, 14 bp, Unknown
  misc_feature (1)..( 14): Result.006 file - promoters50/4801635
ctttgtctcgtctt

SEQ ID NO: 193696 - DNA, 14 bp, Unknown
  misc_feature (1)..( 14): Result.006 file - promoters50/4801635
gatctcatcttcta

SEQ ID NO: 193697 - DNA, 6 bp, Unknown
  misc_feature (1)..( 6): Result.006 file - promoters50/4801635
aaaata

SEQ ID NO: 193698 - DNA, 6 bp, Unknown
  misc_feature (1)..( 6): Result.006 file - promoters50/4801635
aaaata

SEQ ID NO: 193699 - DNA, 6 bp, Unknown
  misc_feature (1)..( 6): Result.006 file - promoters50/4801635
aaaata

SEQ ID NO: 193700 - DNA, 13 bp, Unknown
  misc_feature (1)..( 13): Result.006 file - promoters50/4801635
atttttagttcac

SEQ ID NO: 193701 - DNA, 13 bp, Unknown
  misc_feature (1)..( 13): Result.006 file - promoters50/4801635
atttttttttttt

SEQ ID NO: 193702 - DNA, 13 bp, Unknown
  misc_feature (1)..( 13): Result.006 file - promoters50/4802537
ttttgtaggtcac

SEQ ID NO: 193703 - DNA, 10 bp, Unknown
  misc_feature (1)..( 10): Result.006 file - promoters50/4802537
tatataaagt

SEQ ID NO: 193704 - DNA, 10 bp, Unknown
  misc_feature (1)..( 10): Result.006 file - promoters50/4802537
tatttaaaca

SEQ ID NO: 193705 - DNA, 10 bp, Unknown
  misc_feature (1)..( 10): Result.006 file - promoters50/4802537
atattaaata

SEQ ID NO: 193706 - DNA, 10 bp, Unknown
  misc_feature (1)..( 10): Result.006 file - promoters50/4802537
gctataaaag

SEQ ID NO: 193707 - DNA, 10 bp, Unknown
  misc_feature (1)..( 10): Result.006 file - promoters50/4802537
gtaataaaga

SEQ ID NO: 193708 - DNA, 10 bp, Unknown
  misc_feature (1)..( 10): Result.006 file - promoters50/4803329
tttataaaaa

SEQ ID NO: 193709 - DNA, 10 bp, Unknown
  misc_feature (1)..( 10): Result.006 file - promoters50/4803329
taaagacaaa

SEQ ID NO: 193710 - DNA, 10 bp, Unknown
  misc_feature (1)..( 10): Result.006 file - promoters50/4803329
aaaaaacaca

SEQ ID NO: 193711 - DNA, 10 bp, Unknown
  misc_feature (1)..( 10): Result.006 file - promoters50/4803329
taaagatgat

SEQ ID NO: 193712 - DNA, 10 bp, Unknown
  misc_feature (1)..( 10): Result.006 file - promoters50/4803329
caaaaaatta

SEQ ID NO: 193713 - DNA, 10 bp, Unknown
  misc_feature (1)..( 10): Result.006 file - promoters50/4803329
taaaataaca

SEQ ID NO: 193714 - DNA, 10 bp, Unknown
  misc_feature (1)..( 10): Result.006 file - promoters50/4803329
taaaataaaa

SEQ ID NO: 193715 - DNA, 10 bp, Unknown
  misc_feature (1)..( 10): Result.006 file - promoters50/4803329
caaacatgag

SEQ ID NO: 193716 - DNA, 10 bp, Unknown
  misc_feature (1)..( 10): Result.006 file - promoters50/4803329
caaacagttt

SEQ ID NO: 193717 - DNA, 10 bp, Unknown
  misc_feature (1)..( 10): Result.006 file - promoters50/4803329
aaaaaatggt

SEQ ID NO: 193718 - DNA, 10 bp, Unknown
  misc_feature (1)..( 10): Result.006 file - promoters50/4803329
taaagagttt

SEQ ID NO: 193719 - DNA, 10 bp, Unknown
  misc_feature (1)..( 10): Result.006 file - promoters50/4803329
taaaaaaaaa

SEQ ID NO: 193720 - DNA, 10 bp, Unknown
  misc_feature (1)..( 10): Result.006 file - promoters50/4803329
gaaagaatca

SEQ ID NO: 193721 - DNA, 12 bp, Unknown
  misc_feature (1)..( 12): Result.006 file - promoters50/4803329
gaagacaaacca

SEQ ID NO: 193722 - DNA, 12 bp, Unknown
  misc_feature (1)..( 12): Result.006 file - promoters50/4803329
ttctacaaactg

SEQ ID NO: 193723 - DNA, 12 bp, Unknown
  misc_feature (1)..( 12): Result.006 file - promoters50/4803329
gaagataaagaa

SEQ ID NO: 193724 - DNA, 12 bp, Unknown
  misc_feature (1)..( 12): Result.006 file - promoters50/4803329
acgactaaaaaa

SEQ ID NO: 193725 - DNA, 12 bp, Unknown
  misc_feature (1)..( 12): Result.006 file - promoters50/4803329
cataacaaaaaa

SEQ ID NO: 193726 - DNA, 12 bp, Unknown
  misc_feature (1)..( 12): Result.006 file - promoters50/4803329
atctataaatag

SEQ ID NO: 193727 - DNA, 12 bp, Unknown
  misc_feature (1)..( 12): Result.006 file - promoters50/4803451
gtggataaaatt

SEQ ID NO: 193728 - DNA, 8 bp, Unknown
  misc_feature (1)..( 8): Result.006 file - promoters50/4803451
tttataaa

SEQ ID NO: 193729 - DNA, 8 bp, Unknown
  misc_feature (1)..( 8): Result.006 file - promoters50/4803451
cttataaa

SEQ ID NO: 193730 - DNA, 8 bp, Unknown
  misc_feature (1)..( 8): Result.006 file - promoters50/4803451
cttataac

SEQ ID NO: 193731 - DNA, 8 bp, Unknown
  misc_feature (1)..( 8): Result.006 file - promoters50/4803451
tatacatt

SEQ ID NO: 193732 - DNA, 8 bp, Unknown
  misc_feature (1)..( 8): Result.006 file - promoters50/4803451
tataaatt

SEQ ID NO: 193733 - DNA, 8 bp, Unknown
  misc_feature (1)..( 8): Result.006 file - promoters50/4806023
tataaatc

SEQ ID NO: 193734 - DNA, 10 bp, Unknown
  misc_feature (1)..( 10): Result.006 file - promoters50/4806023
atcttgaata

SEQ ID NO: 193735 - DNA, 10 bp, Unknown
  misc_feature (1)..( 10): Result.006 file - promoters50/4806023
atcttgattt

SEQ ID NO: 193736 - DNA, 10 bp, Unknown
  misc_feature (1)..( 10): Result.006 file - promoters50/4806023
ctctttattt

SEQ ID NO: 193737 - DNA, 7 bp, Unknown
  misc_feature (1)..( 7): Result.006 file - promoters50/4806023
gaccgtt

SEQ ID NO: 193738 - DNA, 7 bp, Unknown
  misc_feature (1)..( 7): Result.006 file - promoters50/4806023
gaccgtg

SEQ ID NO: 193739 - DNA, 7 bp, Unknown
  misc_feature (1)..( 7): Result.006 file - promoters50/4806023
aaccgtt

SEQ ID NO: 193740 - DNA, 9 bp, Unknown
  misc_feature (1)..( 9): Result.006 file - promoters50/4806023
cagtttttg

SEQ ID NO: 193741 - DNA, 9 bp, Unknown
  misc_feature (1)..( 9): Result.006 file - promoters50/4806023
cagctttag

SEQ ID NO: 193742 - DNA, 9 bp, Unknown
  misc_feature (1)..( 9): Result.006 file - promoters50/4806023
aagctgtag

SEQ ID NO: 193743 - DNA, 6 bp, Unknown
  misc_feature (1)..( 6): Result.006 file - promoters50/4806023
ggccca

SEQ ID NO: 193744 - DNA, 6 bp, Unknown
  misc_feature (1)..( 6): Result.006 file - promoters50/4806023
ggccca

SEQ ID NO: 193745 - DNA, 6 bp, Unknown
  misc_feature (1)..( 6): Result.006 file - promoters50/4807018
ggccca

SEQ ID NO: 193746 - DNA, 13 bp, Unknown
  misc_feature (1)..( 13): Result.006 file - promoters50/4807018
tgaacattttttc

SEQ ID NO: 193747 - DNA, 13 bp, Unknown
  misc_feature (1)..( 13): Result.006 file - promoters50/4807018
tgaaaatttatac

SEQ ID NO: 193748 - DNA, 13 bp, Unknown
  misc_feature (1)..( 13): Result.006 file - promoters50/4807018
aagaaatttattc

SEQ ID NO: 193749 - DNA, 13 bp, Unknown
  misc_feature (1)..( 13): Result.006 file - promoters50/4807018
caataatttacat

SEQ ID NO: 193750 - DNA, 13 bp, Unknown
  misc_feature (1)..( 13): Result.006 file - promoters50/4807018
gtataattttata

SEQ ID NO: 193751 - DNA, 13 bp, Unknown
  misc_feature (1)..( 13): Result.006 file - promoters50/4807026
gttgatttttttc

SEQ ID NO: 193752 - DNA, 12 bp, Unknown
  misc_feature (1)..( 12): Result.006 file - promoters50/4807026
ggtcaaaaattc

SEQ ID NO: 193753 - DNA, 12 bp, Unknown
  misc_feature (1)..( 12): Result.006 file - promoters50/4807026
agctaaaatttc

SEQ ID NO: 193754 - DNA, 12 bp, Unknown
  misc_feature (1)..( 12): Result.006 file - promoters50/4807026
tgacaaaaaaag

SEQ ID NO: 193755 - DNA, 12 bp, Unknown
  misc_feature (1)..( 12): Result.006 file - promoters50/4807026
tttaaaaattaa

SEQ ID NO: 193756 - DNA, 12 bp, Unknown
  misc_feature (1)..( 12): Result.006 file - promoters50/4807026
tttcaaaatggt

SEQ ID NO: 193757 - DNA, 12 bp, Unknown
  misc_feature (1)..( 12): Result.006 file - promoters50/4807026
acccaaaattga

SEQ ID NO: 193758 - DNA, 15 bp, Unknown
  misc_feature (1)..( 15): Result.006 file - promoters50/4807026
aaaaaaaaacttata

SEQ ID NO: 193759 - DNA, 15 bp, Unknown
  misc_feature (1)..( 15): Result.006 file - promoters50/4807026
agcctcaaacatata

SEQ ID NO: 193760 - DNA, 15 bp, Unknown
  misc_feature (1)..( 15): Result.006 file - promoters50/4807026
aacaataaaattaat

SEQ ID NO: 193761 - DNA, 15 bp, Unknown
  misc_feature (1)..( 15): Result.006 file - promoters50/4807026
gcggccaaacctttt

SEQ ID NO: 193762 - DNA, 15 bp, Unknown
  misc_feature (1)..( 15): Result.006 file - promoters50/4807026
tgattaaaacattat

SEQ ID NO: 193763 - DNA, 15 bp, Unknown
  misc_feature (1)..( 15): Result.006 file - promoters50/4807026
aaaaagaaagatatc

SEQ ID NO: 193764 - DNA, 15 bp, Unknown
  misc_feature (1)..( 15): Result.006 file - promoters50/4807026
aaatagaaatatagg

SEQ ID NO: 193765 - DNA, 10 bp, Unknown
  misc_feature (1)..( 10): Result.006 file - promoters50/4807026
tgtaaaaata

SEQ ID NO: 193766 - DNA, 10 bp, Unknown
  misc_feature (1)..( 10): Result.006 file - promoters50/4807026
tgtgaaatag

SEQ ID NO: 193767 - DNA, 10 bp, Unknown
  misc_feature (1)..( 10): Result.006 file - promoters50/4807026
tttaaaaatt

SEQ ID NO: 193768 - DNA, 10 bp, Unknown
  misc_feature (1)..( 10): Result.006 file - promoters50/4807026
agctaaaatt

SEQ ID NO: 193769 - DNA, 10 bp, Unknown
  misc_feature (1)..( 10): Result.006 file - promoters50/4807026
agtgaattag

SEQ ID NO: 193770 - DNA, 10 bp, Unknown
  misc_feature (1)..( 10): Result.006 file - promoters50/4807026
ttggaattaa

SEQ ID NO: 193771 - DNA, 10 bp, Unknown
  misc_feature (1)..( 10): Result.006 file - promoters50/4807026
cccaaaattg

SEQ ID NO: 193772 - DNA, 11 bp, Unknown
  misc_feature (1)..( 11): Result.006 file - promoters50/4807026
tgtaaaaataa

SEQ ID NO: 193773 - DNA, 11 bp, Unknown
  misc_feature (1)..( 11): Result.006 file - promoters50/4807026
tagaaatatag

SEQ ID NO: 193774 - DNA, 11 bp, Unknown
  misc_feature (1)..( 11): Result.006 file - promoters50/4807026
tttaaaaatta

SEQ ID NO: 193775 - DNA, 11 bp, Unknown
  misc_feature (1)..( 11): Result.006 file - promoters50/4807026
gacaaaaaaag

SEQ ID NO: 193776 - DNA, 11 bp, Unknown
  misc_feature (1)..( 11): Result.006 file - promoters50/4807026
agctaaaattt

SEQ ID NO: 193777 - DNA, 11 bp, Unknown
  misc_feature (1)..( 11): Result.006 file - promoters50/4807026
tttcaaaatgg

SEQ ID NO: 193778 - DNA, 11 bp, Unknown
  misc_feature (1)..( 11): Result.006 file - promoters50/4807026
acccaaaattg

SEQ ID NO: 193779 - DNA, 10 bp, Unknown
  misc_feature (1)..( 10): Result.006 file - promoters50/4807026
ttaaattaaa

SEQ ID NO: 193780 - DNA, 10 bp, Unknown
  misc_feature (1)..( 10): Result.006 file - promoters50/4807026
ctcaatcaaa

SEQ ID NO: 193781 - DNA, 10 bp, Unknown
  misc_feature (1)..( 10): Result.006 file - promoters50/4807026
tttaataaac

SEQ ID NO: 193782 - DNA, 10 bp, Unknown
  misc_feature (1)..( 10): Result.006 file - promoters50/4807026
cctaattaac

SEQ ID NO: 193783 - DNA, 10 bp, Unknown
  misc_feature (1)..( 10): Result.006 file - promoters50/4807026
caaaatcaaa

SEQ ID NO: 193784 - DNA, 10 bp, Unknown
  misc_feature (1)..( 10): Result.006 file - promoters50/4807026
tttaattttc

SEQ ID NO: 193785 - DNA, 9 bp, Unknown
  misc_feature (1)..( 9): Result.006 file - promoters50/4807026
aataaatga

SEQ ID NO: 193786 - DNA, 9 bp, Unknown
  misc_feature (1)..( 9): Result.006 file - promoters50/4807026
tttaaatgt

SEQ ID NO: 193787 - DNA, 9 bp, Unknown
  misc_feature (1)..( 9): Result.006 file - promoters50/4807026
aattaatct

SEQ ID NO: 193788 - DNA, 9 bp, Unknown
  misc_feature (1)..( 9): Result.006 file - promoters50/4807026
ttttaatat

SEQ ID NO: 193789 - DNA, 9 bp, Unknown
  misc_feature (1)..( 9): Result.006 file - promoters50/4807026
aattaatat

SEQ ID NO: 193790 - DNA, 9 bp, Unknown
  misc_feature (1)..( 9): Result.006 file - promoters50/4807054
ttttattct

SEQ ID NO: 193791 - DNA, 9 bp, Unknown
  misc_feature (1)..( 9): Result.006 file - promoters50/4807054
ttttaagaa

SEQ ID NO: 193792 - DNA, 9 bp, Unknown
  misc_feature (1)..( 9): Result.006 file - promoters50/4807054
gtttatgaa

SEQ ID NO: 193793 - DNA, 9 bp, Unknown
  misc_feature (1)..( 9): Result.006 file - promoters50/4807054
atttattaa

SEQ ID NO: 193794 - DNA, 9 bp, Unknown
  misc_feature (1)..( 9): Result.006 file - promoters50/4807054
ttttaataa

SEQ ID NO: 193795 - DNA, 9 bp, Unknown
  misc_feature (1)..( 9): Result.006 file - promoters50/4807054
atttgttat

SEQ ID NO: 193796 - DNA, 9 bp, Unknown
  misc_feature (1)..( 9): Result.006 file - promoters50/4807258
gcttgttac

SEQ ID NO: 193797 - DNA, 9 bp, Unknown
  misc_feature (1)..( 9): Result.006 file - promoters50/4807258
tcttgtttc

SEQ ID NO: 193798 - DNA, 9 bp, Unknown
  misc_feature (1)..( 9): Result.006 file - promoters50/4807258
tctcgttgt

SEQ ID NO: 193799 - DNA, 9 bp, Unknown
  misc_feature (1)..( 9): Result.006 file - promoters50/4807258
acttttttg

SEQ ID NO: 193800 - DNA, 9 bp, Unknown
  misc_feature (1)..( 9): Result.006 file - promoters50/4807258
gtttgttta

SEQ ID NO: 193801 - DNA, 9 bp, Unknown
  misc_feature (1)..( 9): Result.006 file - promoters50/4807258
aattttttg

SEQ ID NO: 193802 - DNA, 9 bp, Unknown
  misc_feature (1)..( 9): Result.006 file - promoters50/4807258
actttttgt

SEQ ID NO: 193803 - DNA, 10 bp, Unknown
  misc_feature (1)..( 10): Result.006 file - promoters50/4807258
gtttcgttcc

SEQ ID NO: 193804 - DNA, 10 bp, Unknown
  misc_feature (1)..( 10): Result.006 file - promoters50/4807258
tttttgttgt

SEQ ID NO: 193805 - DNA, 10 bp, Unknown
  misc_feature (1)..( 10): Result.006 file - promoters50/4807258
tttttgtgtt

SEQ ID NO: 193806 - DNA, 11 bp, Unknown
  misc_feature (1)..( 11): Result.006 file - promoters50/4807258
attgttgttct

SEQ ID NO: 193807 - DNA, 11 bp, Unknown
  misc_feature (1)..( 11): Result.006 file - promoters50/4807258
ttttttgagct

SEQ ID NO: 193808 - DNA, 11 bp, Unknown
  misc_feature (1)..( 11): Result.006 file - promoters50/4807258
cggtttgttta

SEQ ID NO: 193809 - DNA, 11 bp, Unknown
  misc_feature (1)..( 11): Result.006 file - promoters50/4807258
tctatttaata

SEQ ID NO: 193810 - DNA, 11 bp, Unknown
  misc_feature (1)..( 11): Result.006 file - promoters50/4807258
actatttgata

SEQ ID NO: 193811 - DNA, 11 bp, Unknown
  misc_feature (1)..( 11): Result.006 file - promoters50/4807258
acggtttaatc

SEQ ID NO: 193812 - DNA, 11 bp, Unknown
  misc_feature (1)..( 11): Result.006 file - promoters50/4807258
caaatttaatt

SEQ ID NO: 193813 - DNA, 11 bp, Unknown
  misc_feature (1)..( 11): Result.006 file - promoters50/4807258
tctatttcaat

SEQ ID NO: 193814 - DNA, 11 bp, Unknown
  misc_feature (1)..( 11): Result.006 file - promoters50/4807258
acaatctaatt

SEQ ID NO: 193815 - DNA, 11 bp, Unknown
  misc_feature (1)..( 11): Result.006 file - promoters50/4809022
actttttgtgt

SEQ ID NO: 193816 - DNA, 7 bp, Unknown
  misc_feature (1)..( 7): Result.006 file - promoters50/4809022
ttaacat

SEQ ID NO: 193817 - DNA, 7 bp, Unknown
  misc_feature (1)..( 7): Result.006 file - promoters50/4809022
ttaccat

SEQ ID NO: 193818 - DNA, 7 bp, Unknown
  misc_feature (1)..( 7): Result.006 file - promoters50/4809022
ttaccaa

SEQ ID NO: 193819 - DNA, 6 bp, Unknown
  misc_feature (1)..( 6): Result.006 file - promoters50/4809022
aaaaat

SEQ ID NO: 193820 - DNA, 6 bp, Unknown
  misc_feature (1)..( 6): Result.006 file - promoters50/4809022
aaaaat

SEQ ID NO: 193821 - DNA, 6 bp, Unknown
  misc_feature (1)..( 6): Result.006 file - promoters50/4809022
aaaaat

SEQ ID NO: 193822 - DNA, 8 bp, Unknown
  misc_feature (1)..( 8): Result.006 file - promoters50/4809022
atcatata

SEQ ID NO: 193823 - DNA, 8 bp, Unknown
  misc_feature (1)..( 8): Result.006 file - promoters50/4809022
gtcaaata

SEQ ID NO: 193824 - DNA, 8 bp, Unknown
  misc_feature (1)..( 8): Result.006 file - promoters50/4809022
ataaaaag

SEQ ID NO: 193825 - DNA, 9 bp, Unknown
  misc_feature (1)..( 9): Result.006 file - promoters50/4809022
tatataata

SEQ ID NO: 193826 - DNA, 9 bp, Unknown
  misc_feature (1)..( 9): Result.006 file - promoters50/4809022
tatctaata

SEQ ID NO: 193827 - DNA, 9 bp, Unknown
  misc_feature (1)..( 9): Result.006 file - promoters50/4809022
taaaaaaat

SEQ ID NO: 193828 - DNA, 11 bp, Unknown
  misc_feature (1)..( 11): Result.006 file - promoters50/4809022
ataatttgatg

SEQ ID NO: 193829 - DNA, 11 bp, Unknown
  misc_feature (1)..( 11): Result.006 file - promoters50/4809022
aaactttgatt

SEQ ID NO: 193830 - DNA, 11 bp, Unknown
  misc_feature (1)..( 11): Result.006 file - promoters50/4809801
aaacttttatt

SEQ ID NO: 193831 - DNA, 8 bp, Unknown
  misc_feature (1)..( 8): Result.006 file - promoters50/4809801
attgccat

SEQ ID NO: 193832 - DNA, 8 bp, Unknown
  misc_feature (1)..( 8): Result.006 file - promoters50/4809801
attgcctc

SEQ ID NO: 193833 - DNA, 8 bp, Unknown
  misc_feature (1)..( 8): Result.006 file - promoters50/4809801
atttccat

SEQ ID NO: 193834 - DNA, 9 bp, Unknown
  misc_feature (1)..( 9): Result.006 file - promoters50/4809801
caaaatgta

SEQ ID NO: 193835 - DNA, 9 bp, Unknown
  misc_feature (1)..( 9): Result.006 file - promoters50/4809801
caaaatgaa

SEQ ID NO: 193836 - DNA, 9 bp, Unknown
  misc_feature (1)..( 9): Result.006 file - promoters50/4809801
tcaaatgaa

SEQ ID NO: 193837 - DNA, 7 bp, Unknown
  misc_feature (1)..( 7): Result.006 file - promoters50/4809801
cttttgc

SEQ ID NO: 193838 - DNA, 7 bp, Unknown
  misc_feature (1)..( 7): Result.006 file - promoters50/4809801
tttttgc

SEQ ID NO: 193839 - DNA, 8 bp, Unknown
  misc_feature (1)..( 8): Result.006 file - promoters50/4809801
gttattgt

SEQ ID NO: 193840 - DNA, 7 bp, Unknown
  misc_feature (1)..( 7): Result.006 file - promoters50/4809801
agatctc

SEQ ID NO: 193841 - DNA, 7 bp, Unknown
  misc_feature (1)..( 7): Result.006 file - promoters50/4809801
agatctt

SEQ ID NO: 193842 - DNA, 7 bp, Unknown
  misc_feature (1)..( 7): Result.006 file - promoters50/4810509
agatctc

SEQ ID NO: 193843 - DNA, 12 bp, Unknown
  misc_feature (1)..( 12): Result.006 file - promoters50/4810509
gtaaatttgtca

SEQ ID NO: 193844 - DNA, 12 bp, Unknown
  misc_feature (1)..( 12): Result.006 file - promoters50/4810509
agaaatttttca

SEQ ID NO: 193845 - DNA, 12 bp, Unknown
  misc_feature (1)..( 12): Result.006 file - promoters50/4811341
agaagtttgaga

SEQ ID NO: 193846 - DNA, 9 bp, Unknown
  misc_feature (1)..( 9): Result.006 file - promoters50/4811341
atgtaccgg

SEQ ID NO: 193847 - DNA, 9 bp, Unknown
  misc_feature (1)..( 9): Result.006 file - promoters50/4811341
atgtacata

SEQ ID NO: 193848 - DNA, 9 bp, Unknown
  misc_feature (1)..( 9): Result.006 file - promoters50/4811854
ttgttcata

SEQ ID NO: 193849 - DNA, 8 bp, Unknown
  misc_feature (1)..( 8): Result.006 file - promoters50/4811854
tctatatt

SEQ ID NO: 193850 - DNA, 8 bp, Unknown
  misc_feature (1)..( 8): Result.006 file - promoters50/4811854
tctctatc

SEQ ID NO: 193851 - DNA, 8 bp, Unknown
  misc_feature (1)..( 8): Result.006 file - promoters50/4811854
tctaaatt

SEQ ID NO: 193852 - DNA, 8 bp, Unknown
  misc_feature (1)..( 8): Result.006 file - promoters50/4811854
atttcatt

SEQ ID NO: 193853 - DNA, 8 bp, Unknown
  misc_feature (1)..( 8): Result.006 file - promoters50/4811854
atttcatt

SEQ ID NO: 193854 - DNA, 8 bp, Unknown
  misc_feature (1)..( 8): Result.006 file - promoters50/4811854
ttttaatt

SEQ ID NO: 193855 - DNA, 8 bp, Unknown
  misc_feature (1)..( 8): Result.006 file - promoters50/4811854
atttcaca

SEQ ID NO: 193856 - DNA, 13 bp, Unknown
  misc_feature (1)..( 13): Result.006 file - promoters50/4811854
tttaaaccgaaat

SEQ ID NO: 193857 - DNA, 13 bp, Unknown
  misc_feature (1)..( 13): Result.006 file - promoters50/4811854
tttaaaatctaat

SEQ ID NO: 193858 - DNA, 13 bp, Unknown
  misc_feature (1)..( 13): Result.006 file - promoters50/4811854
attatacctattt

SEQ ID NO: 193859 - DNA, 13 bp, Unknown
  misc_feature (1)..( 13): Result.006 file - promoters50/4811854
tttatacatattt

SEQ ID NO: 193860 - DNA, 11 bp, Unknown
  misc_feature (1)..( 11): Result.006 file - promoters50/4811854
attaatttttg

SEQ ID NO: 193861 - DNA, 11 bp, Unknown
  misc_feature (1)..( 11): Result.006 file - promoters50/4811854
tataatttaaa

SEQ ID NO: 193862 - DNA, 11 bp, Unknown
  misc_feature (1)..( 11): Result.006 file - promoters50/4811854
cataatttttg

SEQ ID NO: 193863 - DNA, 11 bp, Unknown
  misc_feature (1)..( 11): Result.006 file - promoters50/4811854
attaatattta

SEQ ID NO: 193864 - DNA, 9 bp, Unknown
  misc_feature (1)..( 9): Result.006 file - promoters50/4811854
aaaagttag

SEQ ID NO: 193865 - DNA, 9 bp, Unknown
  misc_feature (1)..( 9): Result.006 file - promoters50/4811854
aaaagttaa

SEQ ID NO: 193866 - DNA, 9 bp, Unknown
  misc_feature (1)..( 9): Result.006 file - promoters50/4811854
aaaagttaa

SEQ ID NO: 193867 - DNA, 12 bp, Unknown
  misc_feature (1)..( 12): Result.006 file - promoters50/4811854
gcttacatacat

SEQ ID NO: 193868 - DNA, 12 bp, Unknown
  misc_feature (1)..( 12): Result.006 file - promoters50/4811854
ttatacatattt

SEQ ID NO: 193869 - DNA, 12 bp, Unknown
  misc_feature (1)..( 12): Result.006 file - promoters50/4811854
ttatacctattt

SEQ ID NO: 193870 - DNA, 9 bp, Unknown
  misc_feature (1)..( 9): Result.006 file - promoters50/4811854
attatttta

SEQ ID NO: 193871 - DNA, 9 bp, Unknown
  misc_feature (1)..( 9): Result.006 file - promoters50/4811854
attatatta

SEQ ID NO: 193872 - DNA, 9 bp, Unknown
  misc_feature (1)..( 9): Result.006 file - promoters50/4811975
attatatat

SEQ ID NO: 193873 - DNA, 8 bp, Unknown
  misc_feature (1)..( 8): Result.006 file - promoters50/4811975
attctttt

SEQ ID NO: 193874 - DNA, 8 bp, Unknown
  misc_feature (1)..( 8): Result.006 file - promoters50/4811975
attttttt

SEQ ID NO: 193875 - DNA, 8 bp, Unknown
  misc_feature (1)..( 8): Result.006 file - promoters50/4811975
attttttt

SEQ ID NO: 193876 - DNA, 7 bp, Unknown
  misc_feature (1)..( 7): Result.006 file - promoters50/4811975
cttgaat

SEQ ID NO: 193877 - DNA, 7 bp, Unknown
  misc_feature (1)..( 7): Result.006 file - promoters50/4811975
cttgaaa

SEQ ID NO: 193878 - DNA, 7 bp, Unknown
  misc_feature (1)..( 7): Result.006 file - promoters50/4815093
gttgaaa

SEQ ID NO: 193879 - DNA, 9 bp, Unknown
  misc_feature (1)..( 9): Result.006 file - promoters50/4815093
gttgtagcg

SEQ ID NO: 193880 - DNA, 9 bp, Unknown
  misc_feature (1)..( 9): Result.006 file - promoters50/4815093
gttgtacaa

SEQ ID NO: 193881 - DNA, 9 bp, Unknown
  misc_feature (1)..( 9): Result.006 file - promoters50/4815135
attgaacaa

SEQ ID NO: 193882 - DNA, 8 bp, Unknown
  misc_feature (1)..( 8): Result.006 file - promoters50/4815135
cacggaaa

SEQ ID NO: 193883 - DNA, 8 bp, Unknown
  misc_feature (1)..( 8): Result.006 file - promoters50/4815135
gacgaaaa

SEQ ID NO: 193884 - DNA, 8 bp, Unknown
  misc_feature (1)..( 8): Result.006 file - promoters50/4815135
gaagaaag

SEQ ID NO: 193885 - DNA, 8 bp, Unknown
  misc_feature (1)..( 8): Result.006 file - promoters50/4815135
accaaaaa

SEQ ID NO: 193886 - DNA, 8 bp, Unknown
  misc_feature (1)..( 8): Result.006 file - promoters50/4815135
accagaaa

SEQ ID NO: 193887 - DNA, 8 bp, Unknown
  misc_feature (1)..( 8): Result.006 file - promoters50/4815135
tccaaaaa

SEQ ID NO: 193888 - DNA, 7 bp, Unknown
  misc_feature (1)..( 7): Result.006 file - promoters50/4815135
acacaaa

SEQ ID NO: 193889 - DNA, 7 bp, Unknown
  misc_feature (1)..( 7): Result.006 file - promoters50/4815135
ccacaaa

SEQ ID NO: 193890 - DNA, 7 bp, Unknown
  misc_feature (1)..( 7): Result.006 file - promoters50/4815135
ccacaac

SEQ ID NO: 193891 - DNA, 9 bp, Unknown
  misc_feature (1)..( 9): Result.006 file - promoters50/4815135
caatttgtt

SEQ ID NO: 193892 - DNA, 9 bp, Unknown
  misc_feature (1)..( 9): Result.006 file - promoters50/4815135
aaatttgtt

SEQ ID NO: 193893 - DNA, 10 bp, Unknown
  misc_feature (1)..( 10): Result.006 file - promoters50/4815135
caagtttttt

SEQ ID NO: 193894 - DNA, 12 bp, Unknown
  misc_feature (1)..( 12): Result.006 file - promoters50/4815135
tctgttgtcttc

SEQ ID NO: 193895 - DNA, 12 bp, Unknown
  misc_feature (1)..( 12): Result.006 file - promoters50/4815135
tttgttgtattc

SEQ ID NO: 193896 - DNA, 12 bp, Unknown
  misc_feature (1)..( 12): Result.006 file - promoters50/4816112
ttttttgctgaa

SEQ ID NO: 193897 - DNA, 9 bp, Unknown
  misc_feature (1)..( 9): Result.006 file - promoters50/4816112
tttgatttt

SEQ ID NO: 193898 - DNA, 9 bp, Unknown
  misc_feature (1)..( 9): Result.006 file - promoters50/4816112
tttgatttt

SEQ ID NO: 193899 - DNA, 9 bp, Unknown
  misc_feature (1)..( 9): Result.006 file - promoters50/4816112
attgattca

SEQ ID NO: 193900 - DNA, 9 bp, Unknown
  misc_feature (1)..( 9): Result.006 file - promoters50/4816112
ttttgattt

SEQ ID NO: 193901 - DNA, 9 bp, Unknown
  misc_feature (1)..( 9): Result.006 file - promoters50/4816112
ttttcattt

SEQ ID NO: 193902 - DNA, 9 bp, Unknown
  misc_feature (1)..( 9): Result.006 file - promoters50/4854186
aattgattc

SEQ ID NO: 193903 - DNA, 12 bp, Unknown
  misc_feature (1)..( 12): Result.006 file - promoters50/4854186
aacgaagaggaa

SEQ ID NO: 193904 - DNA, 12 bp, Unknown
  misc_feature (1)..( 12): Result.006 file - promoters50/4854186
tgggaagagaat

SEQ ID NO: 193905 - DNA, 12 bp, Unknown
  misc_feature (1)..( 12): Result.006 file - promoters50/4854186
ggtgaagaagaa

SEQ ID NO: 193906 - DNA, 12 bp, Unknown
  misc_feature (1)..( 12): Result.006 file - promoters50/4854186
aaccaagattaa

SEQ ID NO: 193907 - DNA, 12 bp, Unknown
  misc_feature (1)..( 12): Result.006 file - promoters50/4854186
atcaaagaatac

SEQ ID NO: 193908 - DNA, 12 bp, Unknown
  misc_feature (1)..( 12): Result.006 file - promoters50/4854186
attgaaaaatca

SEQ ID NO: 193909 - DNA, 8 bp, Unknown
  misc_feature (1)..( 8): Result.006 file - promoters50/4854186
aataaacg

SEQ ID NO: 193910 - DNA, 8 bp, Unknown
  misc_feature (1)..( 8): Result.006 file - promoters50/4854186
aataaagg

SEQ ID NO: 193911 - DNA, 8 bp, Unknown
  misc_feature (1)..( 8): Result.006 file - promoters50/4854186
aaaaaaaa

SEQ ID NO: 193912 - DNA, 8 bp, Unknown
  misc_feature (1)..( 8): Result.006 file - promoters50/4854186
aaagaata

SEQ ID NO: 193913 - DNA, 8 bp, Unknown
  misc_feature (1)..( 8): Result.006 file - promoters50/4854186
gaagaatt

SEQ ID NO: 193914 - DNA, 8 bp, Unknown
  misc_feature (1)..( 8): Result.006 file - promoters50/4854186
gaaaaatc

SEQ ID NO: 193915 - DNA, 13 bp, Unknown
  misc_feature (1)..( 13): Result.006 file - promoters50/4854186
tttaaattattat

SEQ ID NO: 193916 - DNA, 13 bp, Unknown
  misc_feature (1)..( 13): Result.006 file - promoters50/4854186
gttaaaatataca

SEQ ID NO: 193917 - DNA, 13 bp, Unknown
  misc_feature (1)..( 13): Result.006 file - promoters50/4854186
attaaaataaagg

SEQ ID NO: 193918 - DNA, 13 bp, Unknown
  misc_feature (1)..( 13): Result.006 file - promoters50/4854186
attgaaaaatcat

SEQ ID NO: 193919 - DNA, 13 bp, Unknown
  misc_feature (1)..( 13): Result.006 file - promoters50/4854186
caaagaatacaca

SEQ ID NO: 193920 - DNA, 13 bp, Unknown
  misc_feature (1)..( 13): Result.006 file - promoters50/4854186
aatgaaatcatgt

SEQ ID NO: 193921 - DNA, 16 bp, Unknown
  misc_feature (1)..( 16): Result.006 file - promoters50/4854186
aagtcagtaaaagttt

SEQ ID NO: 193922 - DNA, 16 bp, Unknown
  misc_feature (1)..( 16): Result.006 file - promoters50/4854186
tagtcactaaaaaggt

SEQ ID NO: 193923 - DNA, 16 bp, Unknown
  misc_feature (1)..( 16): Result.006 file - promoters50/4854186
cattgactaaaagaaa

SEQ ID NO: 193924 - DNA, 16 bp, Unknown
  misc_feature (1)..( 16): Result.006 file - promoters50/4854186
tagtgactcattgcca

SEQ ID NO: 193925 - DNA, 16 bp, Unknown
  misc_feature (1)..( 16): Result.006 file - promoters50/4854186
ttaagaataaaaagac

SEQ ID NO: 193926 - DNA, 16 bp, Unknown
  misc_feature (1)..( 16): Result.006 file - promoters50/4899797
ggattacgaaaaaaaa

SEQ ID NO: 193927 - DNA, 9 bp, Unknown
  misc_feature (1)..( 9): Result.006 file - promoters50/4899797
tatgtttgc

SEQ ID NO: 193928 - DNA, 9 bp, Unknown
  misc_feature (1)..( 9): Result.006 file - promoters50/4899797
tatttttgc

SEQ ID NO: 193929 - DNA, 9 bp, Unknown
  misc_feature (1)..( 9): Result.006 file - promoters50/4899797
tagttttgc

SEQ ID NO: 193930 - DNA, 8 bp, Unknown
  misc_feature (1)..( 8): Result.006 file - promoters50/4899797
taataaat

SEQ ID NO: 193931 - DNA, 8 bp, Unknown
  misc_feature (1)..( 8): Result.006 file - promoters50/4899797
gaataaag

SEQ ID NO: 193932 - DNA, 8 bp, Unknown
  misc_feature (1)..( 8): Result.006 file - promoters50/4899822
taaaaaat

SEQ ID NO: 193933 - DNA, 12 bp, Unknown
  misc_feature (1)..( 12): Result.006 file - promoters50/4899822
gtaaataaaaag

SEQ ID NO: 193934 - DNA, 12 bp, Unknown
  misc_feature (1)..( 12): Result.006 file - promoters50/4899822
cataatcaaatt

SEQ ID NO: 193935 - DNA, 12 bp, Unknown
  misc_feature (1)..( 12): Result.006 file - promoters50/4899822
accaaacaaaac

SEQ ID NO: 193936 - DNA, 12 bp, Unknown
  misc_feature (1)..( 12): Result.006 file - promoters50/4899822
aattatataaag

SEQ ID NO: 193937 - DNA, 12 bp, Unknown
  misc_feature (1)..( 12): Result.006 file - promoters50/4899822
tgtaaagaaaag

SEQ ID NO: 193938 - DNA, 12 bp, Unknown
  misc_feature (1)..( 12): Result.006 file - promoters50/4899822
agaaatcaatgg

SEQ ID NO: 193939 - DNA, 9 bp, Unknown
  misc_feature (1)..( 9): Result.006 file - promoters50/4899822
ctattttcc

SEQ ID NO: 193940 - DNA, 9 bp, Unknown
  misc_feature (1)..( 9): Result.006 file - promoters50/4899822
atattttca

SEQ ID NO: 193941 - DNA, 9 bp, Unknown
  misc_feature (1)..( 9): Result.006 file - promoters50/4899822
ttattttat

SEQ ID NO: 193942 - DNA, 9 bp, Unknown
  misc_feature (1)..( 9): Result.006 file - promoters50/4899822
gtatttttg

SEQ ID NO: 193943 - DNA, 9 bp, Unknown
  misc_feature (1)..( 9): Result.006 file - promoters50/4899822
ttaatttca

SEQ ID NO: 193944 - DNA, 9 bp, Unknown
  misc_feature (1)..( 9): Result.006 file - promoters50/4899830
caaatttca

SEQ ID NO: 193945 - DNA, 10 bp, Unknown
  misc_feature (1)..( 10): Result.006 file - promoters50/4899830
actatataac

SEQ ID NO: 193946 - DNA, 10 bp, Unknown
  misc_feature (1)..( 10): Result.006 file - promoters50/4899830
catatatact

SEQ ID NO: 193947 - DNA, 10 bp, Unknown
  misc_feature (1)..( 10): Result.006 file - promoters50/4899830
ggtatatata

SEQ ID NO: 193948 - DNA, 10 bp, Unknown
  misc_feature (1)..( 10): Result.006 file - promoters50/4899830
actataaaac

SEQ ID NO: 193949 - DNA, 10 bp, Unknown
  misc_feature (1)..( 10): Result.006 file - promoters50/4899830
actatttaaa

SEQ ID NO: 193950 - DNA, 10 bp, Unknown
  misc_feature (1)..( 10): Result.006 file - promoters50/4899830
cttatttatg

SEQ ID NO: 193951 - DNA, 12 bp, Unknown
  misc_feature (1)..( 12): Result.006 file - promoters50/4899830
ttgttaaattaa

SEQ ID NO: 193952 - DNA, 12 bp, Unknown
  misc_feature (1)..( 12): Result.006 file - promoters50/4899830
tcgtaaaactaa

SEQ ID NO: 193953 - DNA, 12 bp, Unknown
  misc_feature (1)..( 12): Result.006 file - promoters50/4899830
aactaaaattag

SEQ ID NO: 193954 - DNA, 12 bp, Unknown
  misc_feature (1)..( 12): Result.006 file - promoters50/4899830
gtaataatttac

SEQ ID NO: 193955 - DNA, 13 bp, Unknown
  misc_feature (1)..( 13): Result.006 file - promoters50/4899830
gaaaaaaagttat

SEQ ID NO: 193956 - DNA, 13 bp, Unknown
  misc_feature (1)..( 13): Result.006 file - promoters50/4899830
gaagaaaaattac

SEQ ID NO: 193957 - DNA, 13 bp, Unknown
  misc_feature (1)..( 13): Result.006 file - promoters50/4899830
tgtgaaaaaaaaa

SEQ ID NO: 193958 - DNA, 14 bp, Unknown
  misc_feature (1)..( 14): Result.006 file - promoters50/4899830
taatattaattttt

SEQ ID NO: 193959 - DNA, 14 bp, Unknown
  misc_feature (1)..( 14): Result.006 file - promoters50/4899830
agttataaatcgtt

SEQ ID NO: 193960 - DNA, 14 bp, Unknown
  misc_feature (1)..( 14): Result.006 file - promoters50/4899830
gtaactaaaattag

SEQ ID NO: 193961 - DNA, 14 bp, Unknown
  misc_feature (1)..( 14): Result.006 file - promoters50/4899830
ataatttactttgg

SEQ ID NO: 193962 - DNA, 14 bp, Unknown
  misc_feature (1)..( 14): Result.006 file - promoters50/4899830
ttggcttaatgttt

SEQ ID NO: 193963 - DNA, 14 bp, Unknown
  misc_feature (1)..( 14): Result.006 file - promoters50/4899830
gagaaaaaaagtta

SEQ ID NO: 193964 - DNA, 14 bp, Unknown
  misc_feature (1)..( 14): Result.006 file - promoters50/4899830
gaagaaaaattacg

SEQ ID NO: 193965 - DNA, 14 bp, Unknown
  misc_feature (1)..( 14): Result.006 file - promoters50/4899830
tgtgaaaaaaaaag

SEQ ID NO: 193966 - DNA, 13 bp, Unknown
  misc_feature (1)..( 13): Result.006 file - promoters50/4899830
ctatttaaattaa

SEQ ID NO: 193967 - DNA, 13 bp, Unknown
  misc_feature (1)..( 13): Result.006 file - promoters50/4899830
ttttgtaaatttt

SEQ ID NO: 193968 - DNA, 13 bp, Unknown
  misc_feature (1)..( 13): Result.006 file - promoters50/4899830
caagcaaaagtaa

SEQ ID NO: 193969 - DNA, 13 bp, Unknown
  misc_feature (1)..( 13): Result.006 file - promoters50/4899830
tagagtaaaccaa

SEQ ID NO: 193970 - DNA, 13 bp, Unknown
  misc_feature (1)..( 13): Result.006 file - promoters50/4899830
aaaaataaactag

SEQ ID NO: 193971 - DNA, 13 bp, Unknown
  misc_feature (1)..( 13): Result.006 file - promoters50/4899830
tttgctaaaaatc

SEQ ID NO: 193972 - DNA, 13 bp, Unknown
  misc_feature (1)..( 13): Result.006 file - promoters50/4899830
cgatgtaaaaatt

SEQ ID NO: 193973 - DNA, 13 bp, Unknown
  misc_feature (1)..( 13): Result.006 file - promoters50/4899830
gaaaaaaagttat

SEQ ID NO: 193974 - DNA, 13 bp, Unknown
  misc_feature (1)..( 13): Result.006 file - promoters50/4899830
acgccttagttat

SEQ ID NO: 193975 - DNA, 13 bp, Unknown
  misc_feature (1)..( 13): Result.006 file - promoters50/4899830
taactaaaattag

SEQ ID NO: 193976 - DNA, 13 bp, Unknown
  misc_feature (1)..( 13): Result.006 file - promoters50/4899830
gaagaaaaattac

SEQ ID NO: 193977 - DNA, 13 bp, Unknown
  misc_feature (1)..( 13): Result.006 file - promoters50/4899830
aaagaaaggtcat

SEQ ID NO: 193978 - DNA, 13 bp, Unknown
  misc_feature (1)..( 13): Result.006 file - promoters50/4899830
tgtgaaaaaaaaa

SEQ ID NO: 193979 - DNA, 9 bp, Unknown
  misc_feature (1)..( 9): Result.006 file - promoters50/4899830
ttctttagg

SEQ ID NO: 193980 - DNA, 9 bp, Unknown
  misc_feature (1)..( 9): Result.006 file - promoters50/4899830
ttcttttgt

SEQ ID NO: 193981 - DNA, 9 bp, Unknown
  misc_feature (1)..( 9): Result.006 file - promoters50/4899830
atctttagg

SEQ ID NO: 193982 - DNA, 10 bp, Unknown
  misc_feature (1)..( 10): Result.006 file - promoters50/4899830
ttcgtttaac

SEQ ID NO: 193983 - DNA, 10 bp, Unknown
  misc_feature (1)..( 10): Result.006 file - promoters50/4899830
tatgtttctt

SEQ ID NO: 193984 - DNA, 10 bp, Unknown
  misc_feature (1)..( 10): Result.006 file - promoters50/4899858
gatgtttgat

SEQ ID NO: 193985 - DNA, 7 bp, Unknown
  misc_feature (1)..( 7): Result.006 file - promoters50/4899858
tttttga

SEQ ID NO: 193986 - DNA, 7 bp, Unknown
  misc_feature (1)..( 7): Result.006 file - promoters50/4899858
tttttgg

SEQ ID NO: 193987 - DNA, 7 bp, Unknown
  misc_feature (1)..( 7): Result.006 file - promoters50/4899858
gttttgg

SEQ ID NO: 193988 - DNA, 10 bp, Unknown
  misc_feature (1)..( 10): Result.006 file - promoters50/4899858
gcaaagaaca

SEQ ID NO: 193989 - DNA, 10 bp, Unknown
  misc_feature (1)..( 10): Result.006 file - promoters50/4899858
gcaaagaaag

SEQ ID NO: 193990 - DNA, 10 bp, Unknown
  misc_feature (1)..( 10): Result.006 file - promoters50/4899858
acaatgaaca

SEQ ID NO: 193991 - DNA, 8 bp, Unknown
  misc_feature (1)..( 8): Result.006 file - promoters50/4899858
ttttcaat

SEQ ID NO: 193992 - DNA, 8 bp, Unknown
  misc_feature (1)..( 8): Result.006 file - promoters50/4899858
ttttcagc

SEQ ID NO: 193993 - DNA, 8 bp, Unknown
  misc_feature (1)..( 8): Result.006 file - promoters50/4899858
ttttgaat

SEQ ID NO: 193994 - DNA, 11 bp, Unknown
  misc_feature (1)..( 11): Result.006 file - promoters50/4899858
acctctcaatt

SEQ ID NO: 193995 - DNA, 11 bp, Unknown
  misc_feature (1)..( 11): Result.006 file - promoters50/4899858
tttactccatt

SEQ ID NO: 193996 - DNA, 11 bp, Unknown
  misc_feature (1)..( 11): Result.006 file - promoters50/4899880
accactcaatg

SEQ ID NO: 193997 - DNA, 8 bp, Unknown
  misc_feature (1)..( 8): Result.006 file - promoters50/4899880
atttttag

SEQ ID NO: 193998 - DNA, 8 bp, Unknown
  misc_feature (1)..( 8): Result.006 file - promoters50/4899880
atttgtag

SEQ ID NO: 193999 - DNA, 8 bp, Unknown
  misc_feature (1)..( 8): Result.006 file - promoters50/4899880
attattag

SEQ ID NO: 194000 - DNA, 6 bp, Unknown
  misc_feature (1)..( 6): Result.006 file - promoters50/4899880
tttgta

SEQ ID NO: 194001 - DNA, 6 bp, Unknown
  misc_feature (1)..( 6): Result.006 file - promoters50/4899880
tttgta

SEQ ID NO: 194002 - DNA, 6 bp, Unknown
  misc_feature (1)..( 6): Result.006 file - promoters50/4899880
tttgta

SEQ ID NO: 194003 - DNA, 6 bp, Unknown
  misc_feature (1)..( 6): Result.006 file - promoters50/4899880
taaaat

SEQ ID NO: 194004 - DNA, 6 bp, Unknown
  misc_feature (1)..( 6): Result.006 file - promoters50/4899880
taaaat

SEQ ID NO: 194005 - DNA, 6 bp, Unknown
  misc_feature (1)..( 6): Result.006 file - promoters50/4899880
taaaat

SEQ ID NO: 194006 - DNA, 7 bp, Unknown
  misc_feature (1)..( 7): Result.006 file - promoters50/4899880
ttaatat

SEQ ID NO: 194007 - DNA, 7 bp, Unknown
  misc_feature (1)..( 7): Result.006 file - promoters50/4899880
ttaataa

SEQ ID NO: 194008 - DNA, 7 bp, Unknown
  misc_feature (1)..( 7): Result.006 file - promoters50/4899880
ttagtat

SEQ ID NO: 194009 - DNA, 7 bp, Unknown
  misc_feature (1)..( 7): Result.006 file - promoters50/4899880
aattcct

SEQ ID NO: 194010 - DNA, 7 bp, Unknown
  misc_feature (1)..( 7): Result.006 file - promoters50/4899880
aattcca

SEQ ID NO: 194011 - DNA, 7 bp, Unknown
  misc_feature (1)..( 7): Result.006 file - promoters50/4899880
aatgcca

SEQ ID NO: 194012 - DNA, 8 bp, Unknown
  misc_feature (1)..( 8): Result.006 file - promoters50/4899880
ctttggaa

SEQ ID NO: 194013 - DNA, 8 bp, Unknown
  misc_feature (1)..( 8): Result.006 file - promoters50/4899880
ctttggaa

SEQ ID NO: 194014 - DNA, 8 bp, Unknown
  misc_feature (1)..( 8): Result.006 file - promoters50/4899880
gtttggag

SEQ ID NO: 194015 - DNA, 8 bp, Unknown
  misc_feature (1)..( 8): Result.006 file - promoters50/4899880
cctaggag

SEQ ID NO: 194016 - DNA, 8 bp, Unknown
  misc_feature (1)..( 8): Result.006 file - promoters50/4899880
actacgag

SEQ ID NO: 194017 - DNA, 8 bp, Unknown
  misc_feature (1)..( 8): Result.006 file - promoters50/4899993
actacgac

SEQ ID NO: 194018 - DNA, 10 bp, Unknown
  misc_feature (1)..( 10): Result.006 file - promoters50/4899993
atgaaagagt

SEQ ID NO: 194019 - DNA, 10 bp, Unknown
  misc_feature (1)..( 10): Result.006 file - promoters50/4899993
atggaagaag

SEQ ID NO: 194020 - DNA, 10 bp, Unknown
  misc_feature (1)..( 10): Result.006 file - promoters50/4899993
cgtaaacagt

SEQ ID NO: 194021 - DNA, 9 bp, Unknown
  misc_feature (1)..( 9): Result.006 file - promoters50/4899993
ccgtcaaaa

SEQ ID NO: 194022 - DNA, 9 bp, Unknown
  misc_feature (1)..( 9): Result.006 file - promoters50/4899993
aggtcaaat

SEQ ID NO: 194023 - DNA, 9 bp, Unknown
  misc_feature (1)..( 9): Result.006 file - promoters50/4900035
ccgtcaaaa

SEQ ID NO: 194024 - DNA, 9 bp, Unknown
  misc_feature (1)..( 9): Result.006 file - promoters50/4900035
ttttacaat

SEQ ID NO: 194025 - DNA, 9 bp, Unknown
  misc_feature (1)..( 9): Result.006 file - promoters50/4900035
cattacaaa

SEQ ID NO: 194026 - DNA, 9 bp, Unknown
  misc_feature (1)..( 9): Result.006 file - promoters50/4900035
atttaaaat

SEQ ID NO: 194027 - DNA, 9 bp, Unknown
  misc_feature (1)..( 9): Result.006 file - promoters50/4900035
acataaaat

SEQ ID NO: 194028 - DNA, 9 bp, Unknown
  misc_feature (1)..( 9): Result.006 file - promoters50/4900035
atatacaaa

SEQ ID NO: 194029 - DNA, 9 bp, Unknown
  misc_feature (1)..( 9): Result.006 file - promoters50/4900121
cataacatt

SEQ ID NO: 194030 - DNA, 9 bp, Unknown
  misc_feature (1)..( 9): Result.006 file - promoters50/4900121
aaagagtta

SEQ ID NO: 194031 - DNA, 9 bp, Unknown
  misc_feature (1)..( 9): Result.006 file - promoters50/4900121
aaagtgtta

SEQ ID NO: 194032 - DNA, 9 bp, Unknown
  misc_feature (1)..( 9): Result.006 file - promoters50/4900121
aaatagatt

SEQ ID NO: 194033 - DNA, 9 bp, Unknown
  misc_feature (1)..( 9): Result.006 file - promoters50/4900121
aaatggatc

SEQ ID NO: 194034 - DNA, 7 bp, Unknown
  misc_feature (1)..( 7): Result.006 file - promoters50/4900121
aaaaaga

SEQ ID NO: 194035 - DNA, 7 bp, Unknown
  misc_feature (1)..( 7): Result.006 file - promoters50/4900121
aaaaagt

SEQ ID NO: 194036 - DNA, 8 bp, Unknown
  misc_feature (1)..( 8): Result.006 file - promoters50/4900121
aaacaaat

SEQ ID NO: 194037 - DNA, 8 bp, Unknown
  misc_feature (1)..( 8): Result.006 file - promoters50/4900121
taaataga

SEQ ID NO: 194038 - DNA, 8 bp, Unknown
  misc_feature (1)..( 8): Result.006 file - promoters50/4900121
atttattt

SEQ ID NO: 194039 - DNA, 8 bp, Unknown
  misc_feature (1)..( 8): Result.006 file - promoters50/4900121
tttttttt

SEQ ID NO: 194040 - DNA, 8 bp, Unknown
  misc_feature (1)..( 8): Result.006 file - promoters50/4900121
aattattt

SEQ ID NO: 194041 - DNA, 8 bp, Unknown
  misc_feature (1)..( 8): Result.006 file - promoters50/4900121
atttatat

SEQ ID NO: 194042 - DNA, 8 bp, Unknown
  misc_feature (1)..( 8): Result.006 file - promoters50/4900121
aataatta

SEQ ID NO: 194043 - DNA, 11 bp, Unknown
  misc_feature (1)..( 11): Result.006 file - promoters50/4900121
ttatttatgat

SEQ ID NO: 194044 - DNA, 11 bp, Unknown
  misc_feature (1)..( 11): Result.006 file - promoters50/4900121
atatttaggat

SEQ ID NO: 194045 - DNA, 11 bp, Unknown
  misc_feature (1)..( 11): Result.006 file - promoters50/4900121
agatttatatt

SEQ ID NO: 194046 - DNA, 11 bp, Unknown
  misc_feature (1)..( 11): Result.006 file - promoters50/4900121
atatttgataa

SEQ ID NO: 194047 - DNA, 9 bp, Unknown
  misc_feature (1)..( 9): Result.006 file - promoters50/4900121
tgttttgta

SEQ ID NO: 194048 - DNA, 9 bp, Unknown
  misc_feature (1)..( 9): Result.006 file - promoters50/4900121
tgttttctt

SEQ ID NO: 194049 - DNA, 9 bp, Unknown
  misc_feature (1)..( 9): Result.006 file - promoters50/4900121
cgtttagta

SEQ ID NO: 194050 - DNA, 9 bp, Unknown
  misc_feature (1)..( 9): Result.006 file - promoters50/4900121
tgtttttat

SEQ ID NO: 194051 - DNA, 9 bp, Unknown
  misc_feature (1)..( 9): Result.006 file - promoters50/4900121
tttttattt

SEQ ID NO: 194052 - DNA, 9 bp, Unknown
  misc_feature (1)..( 9): Result.006 file - promoters50/4900121
tttatatta

SEQ ID NO: 194053 - DNA, 9 bp, Unknown
  misc_feature (1)..( 9): Result.006 file - promoters50/4900121
agtatattt

SEQ ID NO: 194054 - DNA, 9 bp, Unknown
  misc_feature (1)..( 9): Result.006 file - promoters50/4900121
tgaatattt

SEQ ID NO: 194055 - DNA, 10 bp, Unknown
  misc_feature (1)..( 10): Result.006 file - promoters50/4900121
gaatcttctt

SEQ ID NO: 194056 - DNA, 10 bp, Unknown
  misc_feature (1)..( 10): Result.006 file - promoters50/4900121
ttaccttctt

SEQ ID NO: 194057 - DNA, 10 bp, Unknown
  misc_feature (1)..( 10): Result.006 file - promoters50/4900121
aaatcttctg

SEQ ID NO: 194058 - DNA, 10 bp, Unknown
  misc_feature (1)..( 10): Result.006 file - promoters50/4900121
aaaccttgtg

SEQ ID NO: 194059 - DNA, 8 bp, Unknown
  misc_feature (1)..( 8): Result.006 file - promoters50/4900121
atttgtat

SEQ ID NO: 194060 - DNA, 8 bp, Unknown
  misc_feature (1)..( 8): Result.006 file - promoters50/4900121
ttttgtac

SEQ ID NO: 194061 - DNA, 8 bp, Unknown
  misc_feature (1)..( 8): Result.006 file - promoters50/4900121
atttatat

SEQ ID NO: 194062 - DNA, 8 bp, Unknown
  misc_feature (1)..( 8): Result.006 file - promoters50/4900121
ttttttac

SEQ ID NO: 194063 - DNA, 9 bp, Unknown
  misc_feature (1)..( 9): Result.006 file - promoters50/4900121
gaaacaact

SEQ ID NO: 194064 - DNA, 9 bp, Unknown
  misc_feature (1)..( 9): Result.006 file - promoters50/4900121
caaaaaacc

SEQ ID NO: 194065 - DNA, 9 bp, Unknown
  misc_feature (1)..( 9): Result.006 file - promoters50/4900121
caaaaaata

SEQ ID NO: 194066 - DNA, 9 bp, Unknown
  misc_feature (1)..( 9): Result.006 file - promoters50/4900213
taaaatata

SEQ ID NO: 194067 - DNA, 8 bp, Unknown
  misc_feature (1)..( 8): Result.006 file - promoters50/4900213
acttaagt

SEQ ID NO: 194068 - DNA, 8 bp, Unknown
  misc_feature (1)..( 8): Result.006 file - promoters50/4900213
actaaaga

SEQ ID NO: 194069 - DNA, 8 bp, Unknown
  misc_feature (1)..( 8): Result.006 file - promoters50/4900213
tctttagt

SEQ ID NO: 194070 - DNA, 8 bp, Unknown
  misc_feature (1)..( 8): Result.006 file - promoters50/4900213
tgagtaat

SEQ ID NO: 194071 - DNA, 8 bp, Unknown
  misc_feature (1)..( 8): Result.006 file - promoters50/4900213
tgattaaa

SEQ ID NO: 194072 - DNA, 8 bp, Unknown
  misc_feature (1)..( 8): Result.006 file - promoters50/4900213
ttattaaa

SEQ ID NO: 194073 - DNA, 7 bp, Unknown
  misc_feature (1)..( 7): Result.006 file - promoters50/4900213
aaaattt

SEQ ID NO: 194074 - DNA, 7 bp, Unknown
  misc_feature (1)..( 7): Result.006 file - promoters50/4900213
taaattt

SEQ ID NO: 194075 - DNA, 7 bp, Unknown
  misc_feature (1)..( 7): Result.006 file - promoters50/4900213
taacttt

SEQ ID NO: 194076 - DNA, 8 bp, Unknown
  misc_feature (1)..( 8): Result.006 file - promoters50/4900213
accaaagt

SEQ ID NO: 194077 - DNA, 8 bp, Unknown
  misc_feature (1)..( 8): Result.006 file - promoters50/4900213
accaaaaa

SEQ ID NO: 194078 - DNA, 8 bp, Unknown
  misc_feature (1)..( 8): Result.006 file - promoters50/4900353
tccaaaaa

SEQ ID NO: 194079 - DNA, 9 bp, Unknown
  misc_feature (1)..( 9): Result.006 file - promoters50/4900353
aatacttta

SEQ ID NO: 194080 - DNA, 9 bp, Unknown
  misc_feature (1)..( 9): Result.006 file - promoters50/4900353
catattttt

SEQ ID NO: 194081 - DNA, 9 bp, Unknown
  misc_feature (1)..( 9): Result.006 file - promoters50/4900353
accattttt

SEQ ID NO: 194082 - DNA, 9 bp, Unknown
  misc_feature (1)..( 9): Result.006 file - promoters50/4900353
tttattttt

SEQ ID NO: 194083 - DNA, 9 bp, Unknown
  misc_feature (1)..( 9): Result.006 file - promoters50/4900353
accatttta

SEQ ID NO: 194084 - DNA, 9 bp, Unknown
  misc_feature (1)..( 9): Result.006 file - promoters50/4900353
tcaattttt

SEQ ID NO: 194085 - DNA, 11 bp, Unknown
  misc_feature (1)..( 11): Result.006 file - promoters50/4900353
taagataggaa

SEQ ID NO: 194086 - DNA, 11 bp, Unknown
  misc_feature (1)..( 11): Result.006 file - promoters50/4900353
taatatatatt

SEQ ID NO: 194087 - DNA, 11 bp, Unknown
  misc_feature (1)..( 11): Result.006 file - promoters50/4900353
tgatataaatt

SEQ ID NO: 194088 - DNA, 11 bp, Unknown
  misc_feature (1)..( 11): Result.006 file - promoters50/4900353
atttataaatg

SEQ ID NO: 194089 - DNA, 11 bp, Unknown
  misc_feature (1)..( 11): Result.006 file - promoters50/4900353
aaatttatttt

SEQ ID NO: 194090 - DNA, 11 bp, Unknown
  misc_feature (1)..( 11): Result.006 file - promoters50/4900353
gaatttatgta

SEQ ID NO: 194091 - DNA, 15 bp, Unknown
  misc_feature (1)..( 15): Result.006 file - promoters50/4900353
aattatttttgtaaa

SEQ ID NO: 194092 - DNA, 15 bp, Unknown
  misc_feature (1)..( 15): Result.006 file - promoters50/4900353
actgatttttaataa

SEQ ID NO: 194093 - DNA, 15 bp, Unknown
  misc_feature (1)..( 15): Result.006 file - promoters50/4900353
atagatatttaattt

SEQ ID NO: 194094 - DNA, 15 bp, Unknown
  misc_feature (1)..( 15): Result.006 file - promoters50/4900353
agtcattcttatcaa

SEQ ID NO: 194095 - DNA, 15 bp, Unknown
  misc_feature (1)..( 15): Result.006 file - promoters50/4900353
ttgtgttcttagttc

SEQ ID NO: 194096 - DNA, 15 bp, Unknown
  misc_feature (1)..( 15): Result.006 file - promoters50/4900353
tctacttcttattgg

SEQ ID NO: 194097 - DNA, 15 bp, Unknown
  misc_feature (1)..( 15): Result.006 file - promoters50/4900353
agagattgcaatgga

SEQ ID NO: 194098 - DNA, 13 bp, Unknown
  misc_feature (1)..( 13): Result.006 file - promoters50/4900353
aaaagttataaga

SEQ ID NO: 194099 - DNA, 13 bp, Unknown
  misc_feature (1)..( 13): Result.006 file - promoters50/4900353
aaaatttataaat

SEQ ID NO: 194100 - DNA, 13 bp, Unknown
  misc_feature (1)..( 13): Result.006 file - promoters50/4900353
aaaatttattttt

SEQ ID NO: 194101 - DNA, 13 bp, Unknown
  misc_feature (1)..( 13): Result.006 file - promoters50/4900353
ctctgatataaat

SEQ ID NO: 194102 - DNA, 13 bp, Unknown
  misc_feature (1)..( 13): Result.006 file - promoters50/4900353
ctaatatatattc

SEQ ID NO: 194103 - DNA, 13 bp, Unknown
  misc_feature (1)..( 13): Result.006 file - promoters50/4900353
ggaatttatgtat

SEQ ID NO: 194104 - DNA, 15 bp, Unknown
  misc_feature (1)..( 15): Result.006 file - promoters50/4900353
aggtataattatttt

SEQ ID NO: 194105 - DNA, 15 bp, Unknown
  misc_feature (1)..( 15): Result.006 file - promoters50/4900353
tcttatgatttgctt

SEQ ID NO: 194106 - DNA, 15 bp, Unknown
  misc_feature (1)..( 15): Result.006 file - promoters50/4900353
atatttaatttgtgt

SEQ ID NO: 194107 - DNA, 15 bp, Unknown
  misc_feature (1)..( 15): Result.006 file - promoters50/4900353
agatatgttttgggg

SEQ ID NO: 194108 - DNA, 15 bp, Unknown
  misc_feature (1)..( 15): Result.006 file - promoters50/4900353
ccaaaagttttgtca

SEQ ID NO: 194109 - DNA, 15 bp, Unknown
  misc_feature (1)..( 15): Result.006 file - promoters50/4900353
aaaactgatttttaa

SEQ ID NO: 194110 - DNA, 15 bp, Unknown
  misc_feature (1)..( 15): Result.006 file - promoters50/4900417
cagtcgaagttgtgt

SEQ ID NO: 194111 - DNA, 11 bp, Unknown
  misc_feature (1)..( 11): Result.006 file - promoters50/4900417
aattttaaaga

SEQ ID NO: 194112 - DNA, 11 bp, Unknown
  misc_feature (1)..( 11): Result.006 file - promoters50/4900417
ttttttaaaaa

SEQ ID NO: 194113 - DNA, 11 bp, Unknown
  misc_feature (1)..( 11): Result.006 file - promoters50/4900417
aatgttagggg

SEQ ID NO: 194114 - DNA, 11 bp, Unknown
  misc_feature (1)..( 11): Result.006 file - promoters50/4900417
ttttttaatta

SEQ ID NO: 194115 - DNA, 11 bp, Unknown
  misc_feature (1)..( 11): Result.006 file - promoters50/4900417
gcttttactta

SEQ ID NO: 194116 - DNA, 11 bp, Unknown
  misc_feature (1)..( 11): Result.006 file - promoters50/4900417
ttacttaatgt

SEQ ID NO: 194117 - DNA, 10 bp, Unknown
  misc_feature (1)..( 10): Result.006 file - promoters50/4900417
ttgtgaaaat

SEQ ID NO: 194118 - DNA, 10 bp, Unknown
  misc_feature (1)..( 10): Result.006 file - promoters50/4900417
ttgagaaaag

SEQ ID NO: 194119 - DNA, 10 bp, Unknown
  misc_feature (1)..( 10): Result.006 file - promoters50/4900417
tcaagaaaat

SEQ ID NO: 194120 - DNA, 10 bp, Unknown
  misc_feature (1)..( 10): Result.006 file - promoters50/4900417
tagagataag

SEQ ID NO: 194121 - DNA, 10 bp, Unknown
  misc_feature (1)..( 10): Result.006 file - promoters50/4900417
aggagagaat

SEQ ID NO: 194122 - DNA, 10 bp, Unknown
  misc_feature (1)..( 10): Result.006 file - promoters50/4900417
atgagagatg

SEQ ID NO: 194123 - DNA, 11 bp, Unknown
  misc_feature (1)..( 11): Result.006 file - promoters50/4900417
ataatataaga

SEQ ID NO: 194124 - DNA, 11 bp, Unknown
  misc_feature (1)..( 11): Result.006 file - promoters50/4900417
agaatgtaaat

SEQ ID NO: 194125 - DNA, 11 bp, Unknown
  misc_feature (1)..( 11): Result.006 file - promoters50/4900417
tgaatatagat

SEQ ID NO: 194126 - DNA, 11 bp, Unknown
  misc_feature (1)..( 11): Result.006 file - promoters50/4900417
tctatatgaga

SEQ ID NO: 194127 - DNA, 11 bp, Unknown
  misc_feature (1)..( 11): Result.006 file - promoters50/4900417
ataagatacgc

SEQ ID NO: 194128 - DNA, 11 bp, Unknown
  misc_feature (1)..( 11): Result.006 file - promoters50/4900417
ttgagaaaagg

SEQ ID NO: 194129 - DNA, 9 bp, Unknown
  misc_feature (1)..( 9): Result.006 file - promoters50/4900417
tataagaaa

SEQ ID NO: 194130 - DNA, 9 bp, Unknown
  misc_feature (1)..( 9): Result.006 file - promoters50/4900417
tgtaagaat

SEQ ID NO: 194131 - DNA, 9 bp, Unknown
  misc_feature (1)..( 9): Result.006 file - promoters50/4900417
gataaaaga

SEQ ID NO: 194132 - DNA, 9 bp, Unknown
  misc_feature (1)..( 9): Result.006 file - promoters50/4900417
tatatgaga

SEQ ID NO: 194133 - DNA, 9 bp, Unknown
  misc_feature (1)..( 9): Result.006 file - promoters50/4900417
gataagata

SEQ ID NO: 194134 - DNA, 9 bp, Unknown
  misc_feature (1)..( 9): Result.006 file - promoters50/4900417
gagaaaagg

SEQ ID NO: 194135 - DNA, 11 bp, Unknown
  misc_feature (1)..( 11): Result.006 file - promoters50/4900417
tttttcatttt

SEQ ID NO: 194136 - DNA, 11 bp, Unknown
  misc_feature (1)..( 11): Result.006 file - promoters50/4900417
aatttgatttc

SEQ ID NO: 194137 - DNA, 12 bp, Unknown
  misc_feature (1)..( 12): Result.006 file - promoters50/4900417
tttgacatattt

SEQ ID NO: 194138 - DNA, 12 bp, Unknown
  misc_feature (1)..( 12): Result.006 file - promoters50/4900417
attttcaaattt

SEQ ID NO: 194139 - DNA, 12 bp, Unknown
  misc_feature (1)..( 12): Result.006 file - promoters50/4900417
atgttcgttttc

SEQ ID NO: 194140 - DNA, 12 bp, Unknown
  misc_feature (1)..( 12): Result.006 file - promoters50/4900417
aatttgaaatcg

SEQ ID NO: 194141 - DNA, 9 bp, Unknown
  misc_feature (1)..( 9): Result.006 file - promoters50/4900417
ttatttttt

SEQ ID NO: 194142 - DNA, 9 bp, Unknown
  misc_feature (1)..( 9): Result.006 file - promoters50/4900417
atatctttc

SEQ ID NO: 194143 - DNA, 9 bp, Unknown
  misc_feature (1)..( 9): Result.006 file - promoters50/4900417
ttttcttta

SEQ ID NO: 194144 - DNA, 9 bp, Unknown
  misc_feature (1)..( 9): Result.006 file - promoters50/4900417
aattcttta

SEQ ID NO: 194145 - DNA, 9 bp, Unknown
  misc_feature (1)..( 9): Result.006 file - promoters50/4900417
ttttctcat

SEQ ID NO: 194146 - DNA, 9 bp, Unknown
  misc_feature (1)..( 9): Result.006 file - promoters50/4900589
gcatttttc

SEQ ID NO: 194147 - DNA, 11 bp, Unknown
  misc_feature (1)..( 11): Result.006 file - promoters50/4900589
gtataaattga

SEQ ID NO: 194148 - DNA, 11 bp, Unknown
  misc_feature (1)..( 11): Result.006 file - promoters50/4900589
gtaaaaatatc

SEQ ID NO: 194149 - DNA, 11 bp, Unknown
  misc_feature (1)..( 11): Result.006 file - promoters50/4900589
taataaattga

SEQ ID NO: 194150 - DNA, 9 bp, Unknown
  misc_feature (1)..( 9): Result.006 file - promoters50/4900589
caaaaagag

SEQ ID NO: 194151 - DNA, 9 bp, Unknown
  misc_feature (1)..( 9): Result.006 file - promoters50/4900589
caaagagag

SEQ ID NO: 194152 - DNA, 9 bp, Unknown
  misc_feature (1)..( 9): Result.006 file - promoters50/4900589
caaaaacca

SEQ ID NO: 194153 - DNA, 9 bp, Unknown
  misc_feature (1)..( 9): Result.006 file - promoters50/4900589
attgttttt

SEQ ID NO: 194154 - DNA, 9 bp, Unknown
  misc_feature (1)..( 9): Result.006 file - promoters50/4900589
tttgtttta

SEQ ID NO: 194155 - DNA, 9 bp, Unknown
  misc_feature (1)..( 9): Result.006 file - promoters50/4900589
tcggttttt

SEQ ID NO: 194156 - DNA, 9 bp, Unknown
  misc_feature (1)..( 9): Result.006 file - promoters50/4900589
tttcttttt

SEQ ID NO: 194157 - DNA, 9 bp, Unknown
  misc_feature (1)..( 9): Result.006 file - promoters50/4900589
tgaagcaaa

SEQ ID NO: 194158 - DNA, 9 bp, Unknown
  misc_feature (1)..( 9): Result.006 file - promoters50/4900589
tgaaacaaa

SEQ ID NO: 194159 - DNA, 9 bp, Unknown
  misc_feature (1)..( 9): Result.006 file - promoters50/4900589
atacataaa

SEQ ID NO: 194160 - DNA, 9 bp, Unknown
  misc_feature (1)..( 9): Result.006 file - promoters50/4900589
tatttattt

SEQ ID NO: 194161 - DNA, 9 bp, Unknown
  misc_feature (1)..( 9): Result.006 file - promoters50/4900589
tatttattt

SEQ ID NO: 194162 - DNA, 9 bp, Unknown
  misc_feature (1)..( 9): Result.006 file - promoters50/4900589
tatttacat

SEQ ID NO: 194163 - DNA, 8 bp, Unknown
  misc_feature (1)..( 8): Result.006 file - promoters50/4900589
gtaaatca

SEQ ID NO: 194164 - DNA, 8 bp, Unknown
  misc_feature (1)..( 8): Result.006 file - promoters50/4900589
gtagatcc

SEQ ID NO: 194165 - DNA, 8 bp, Unknown
  misc_feature (1)..( 8): Result.006 file - promoters50/4900589
tcaaatca

SEQ ID NO: 194166 - DNA, 8 bp, Unknown
  misc_feature (1)..( 8): Result.006 file - promoters50/4900589
ttagatcg

SEQ ID NO: 194167 - DNA, 8 bp, Unknown
  misc_feature (1)..( 8): Result.006 file - promoters50/4900589
tttgtttg

SEQ ID NO: 194168 - DNA, 8 bp, Unknown
  misc_feature (1)..( 8): Result.006 file - promoters50/4900589
tttctttt

SEQ ID NO: 194169 - DNA, 8 bp, Unknown
  misc_feature (1)..( 8): Result.006 file - promoters50/4900589
tttgtttt

SEQ ID NO: 194170 - DNA, 13 bp, Unknown
  misc_feature (1)..( 13): Result.006 file - promoters50/4900589
aatccaaaatttg

SEQ ID NO: 194171 - DNA, 13 bp, Unknown
  misc_feature (1)..( 13): Result.006 file - promoters50/4900589
tatctaaattttg

SEQ ID NO: 194172 - DNA, 13 bp, Unknown
  misc_feature (1)..( 13): Result.006 file - promoters50/4900589
aattcaaaaaaaa

SEQ ID NO: 194173 - DNA, 13 bp, Unknown
  misc_feature (1)..( 13): Result.006 file - promoters50/4900589
gcctacaattttg

SEQ ID NO: 194174 - DNA, 10 bp, Unknown
  misc_feature (1)..( 10): Result.006 file - promoters50/4900589
aaaatcaaaa

SEQ ID NO: 194175 - DNA, 10 bp, Unknown
  misc_feature (1)..( 10): Result.006 file - promoters50/4900589
aaaaccaaac

SEQ ID NO: 194176 - DNA, 10 bp, Unknown
  misc_feature (1)..( 10): Result.006 file - promoters50/4900589
tcgtccaaac

SEQ ID NO: 194177 - DNA, 9 bp, Unknown
  misc_feature (1)..( 9): Result.006 file - promoters50/4900589
caaatagta

SEQ ID NO: 194178 - DNA, 9 bp, Unknown
  misc_feature (1)..( 9): Result.006 file - promoters50/4900589
caaaaagtg

SEQ ID NO: 194179 - DNA, 9 bp, Unknown
  misc_feature (1)..( 9): Result.006 file - promoters50/4900589
ttcaaagtg

SEQ ID NO: 194180 - DNA, 8 bp, Unknown
  misc_feature (1)..( 8): Result.006 file - promoters50/4900589
tgggtttt

SEQ ID NO: 194181 - DNA, 8 bp, Unknown
  misc_feature (1)..( 8): Result.006 file - promoters50/4900589
tggatttc

SEQ ID NO: 194182 - DNA, 8 bp, Unknown
  misc_feature (1)..( 8): Result.006 file - promoters50/4900589
tcggtttt

SEQ ID NO: 194183 - DNA, 8 bp, Unknown
  misc_feature (1)..( 8): Result.006 file - promoters50/4900589
ttttaatt

SEQ ID NO: 194184 - DNA, 8 bp, Unknown
  misc_feature (1)..( 8): Result.006 file - promoters50/4900589
ttttaatt

SEQ ID NO: 194185 - DNA, 8 bp, Unknown
  misc_feature (1)..( 8): Result.006 file - promoters50/4900643
gcttaatt

SEQ ID NO: 194186 - DNA, 8 bp, Unknown
  misc_feature (1)..( 8): Result.006 file - promoters50/4900643
tgtgggtt

SEQ ID NO: 194187 - DNA, 8 bp, Unknown
  misc_feature (1)..( 8): Result.006 file - promoters50/4900643
tgtcggtt

SEQ ID NO: 194188 - DNA, 8 bp, Unknown
  misc_feature (1)..( 8): Result.006 file - promoters50/4900643
attgggtt

SEQ ID NO: 194189 - DNA, 9 bp, Unknown
  misc_feature (1)..( 9): Result.006 file - promoters50/4900643
tttcttttc

SEQ ID NO: 194190 - DNA, 9 bp, Unknown
  misc_feature (1)..( 9): Result.006 file - promoters50/4900643
tttatttac

SEQ ID NO: 194191 - DNA, 9 bp, Unknown
  misc_feature (1)..( 9): Result.006 file - promoters50/4900800
catatttac

SEQ ID NO: 194192 - DNA, 9 bp, Unknown
  misc_feature (1)..( 9): Result.006 file - promoters50/4900800
caagaaaga

SEQ ID NO: 194193 - DNA, 9 bp, Unknown
  misc_feature (1)..( 9): Result.006 file - promoters50/4900800
aaagaaaaa

SEQ ID NO: 194194 - DNA, 9 bp, Unknown
  misc_feature (1)..( 9): Result.006 file - promoters50/4900800
caataaaat

SEQ ID NO: 194195 - DNA, 9 bp, Unknown
  misc_feature (1)..( 9): Result.006 file - promoters50/4900800
ggagacaga

SEQ ID NO: 194196 - DNA, 9 bp, Unknown
  misc_feature (1)..( 9): Result.006 file - promoters50/4900800
gaagaaagg

SEQ ID NO: 194197 - DNA, 13 bp, Unknown
  misc_feature (1)..( 13): Result.006 file - promoters50/4900800
aatttcatgaaga

SEQ ID NO: 194198 - DNA, 13 bp, Unknown
  misc_feature (1)..( 13): Result.006 file - promoters50/4900800
aatctcacgaaca

SEQ ID NO: 194199 - DNA, 13 bp, Unknown
  misc_feature (1)..( 13): Result.006 file - promoters50/4900800
agaaggatgaaga

SEQ ID NO: 194200 - DNA, 13 bp, Unknown
  misc_feature (1)..( 13): Result.006 file - promoters50/4900800
aaatgaacgcaca

SEQ ID NO: 194201 - DNA, 13 bp, Unknown
  misc_feature (1)..( 13): Result.006 file - promoters50/4900939
gacgggaggaaga

SEQ ID NO: 194202 - DNA, 13 bp, Unknown
  misc_feature (1)..( 13): Result.006 file - promoters50/4900939
ctaaacaaataat

SEQ ID NO: 194203 - DNA, 13 bp, Unknown
  misc_feature (1)..( 13): Result.006 file - promoters50/4900939
aaaaataaaaagt

SEQ ID NO: 194204 - DNA, 13 bp, Unknown
  misc_feature (1)..( 13): Result.006 file - promoters50/4900939
ctaaacactaatg

SEQ ID NO: 194205 - DNA, 13 bp, Unknown
  misc_feature (1)..( 13): Result.006 file - promoters50/4900939
tataataagtcaa

SEQ ID NO: 194206 - DNA, 13 bp, Unknown
  misc_feature (1)..( 13): Result.006 file - promoters50/4900939
caaatcaaattat

SEQ ID NO: 194207 - DNA, 13 bp, Unknown
  misc_feature (1)..( 13): Result.006 file - promoters50/4901133
aatgtcacattca

SEQ ID NO: 194208 - DNA, 15 bp, Unknown
  misc_feature (1)..( 15): Result.006 file - promoters50/4901133
tcctttagttttaat

SEQ ID NO: 194209 - DNA, 15 bp, Unknown
  misc_feature (1)..( 15): Result.006 file - promoters50/4901133
gaattttgtttttga

SEQ ID NO: 194210 - DNA, 16 bp, Unknown
  misc_feature (1)..( 16): Result.006 file - promoters50/4901133
ccaaattgattttgat

SEQ ID NO: 194211 - DNA, 16 bp, Unknown
  misc_feature (1)..( 16): Result.006 file - promoters50/4901133
taaattatgttattat

SEQ ID NO: 194212 - DNA, 16 bp, Unknown
  misc_feature (1)..( 16): Result.006 file - promoters50/4901133
taatttaatgcatcta

SEQ ID NO: 194213 - DNA, 16 bp, Unknown
  misc_feature (1)..( 16): Result.006 file - promoters50/4901133
tattatatgtttcaaa

SEQ ID NO: 194214 - DNA, 10 bp, Unknown
  misc_feature (1)..( 10): Result.006 file - promoters50/4901133
ttttcaaaat

SEQ ID NO: 194215 - DNA, 10 bp, Unknown
  misc_feature (1)..( 10): Result.006 file - promoters50/4901133
aaatcaaaat

SEQ ID NO: 194216 - DNA, 10 bp, Unknown
  misc_feature (1)..( 10): Result.006 file - promoters50/4901133
gtttcaaaaa

SEQ ID NO: 194217 - DNA, 10 bp, Unknown
  misc_feature (1)..( 10): Result.006 file - promoters50/4901133
atttgaaatc

SEQ ID NO: 194218 - DNA, 10 bp, Unknown
  misc_feature (1)..( 10): Result.006 file - promoters50/4901133
atttgatcac

SEQ ID NO: 194219 - DNA, 10 bp, Unknown
  misc_feature (1)..( 10): Result.006 file - promoters50/4901149
atttgagcgg

SEQ ID NO: 194220 - DNA, 8 bp, Unknown
  misc_feature (1)..( 8): Result.006 file - promoters50/4901149
tatttcta

SEQ ID NO: 194221 - DNA, 8 bp, Unknown
  misc_feature (1)..( 8): Result.006 file - promoters50/4901149
aatttctt

SEQ ID NO: 194222 - DNA, 8 bp, Unknown
  misc_feature (1)..( 8): Result.006 file - promoters50/4901149
aatatctt

SEQ ID NO: 194223 - DNA, 9 bp, Unknown
  misc_feature (1)..( 9): Result.006 file - promoters50/4901149
tatgtaaac

SEQ ID NO: 194224 - DNA, 9 bp, Unknown
  misc_feature (1)..( 9): Result.006 file - promoters50/4901149
aatgaaaat

SEQ ID NO: 194225 - DNA, 9 bp, Unknown
  misc_feature (1)..( 9): Result.006 file - promoters50/4901149
aatcaaaat

SEQ ID NO: 194226 - DNA, 7 bp, Unknown
  misc_feature (1)..( 7): Result.006 file - promoters50/4901149
tctaata

SEQ ID NO: 194227 - DNA, 7 bp, Unknown
  misc_feature (1)..( 7): Result.006 file - promoters50/4901149
tctaatc

SEQ ID NO: 194228 - DNA, 7 bp, Unknown
  misc_feature (1)..( 7): Result.006 file - promoters50/4901149
gctaata

SEQ ID NO: 194229 - DNA, 8 bp, Unknown
  misc_feature (1)..( 8): Result.006 file - promoters50/4901149
ctctccaa

SEQ ID NO: 194230 - DNA, 8 bp, Unknown
  misc_feature (1)..( 8): Result.006 file - promoters50/4901149
ctctcctt

SEQ ID NO: 194231 - DNA, 8 bp, Unknown
  misc_feature (1)..( 8): Result.006 file - promoters50/4901149
ttctcctt

SEQ ID NO: 194232 - DNA, 7 bp, Unknown
  misc_feature (1)..( 7): Result.006 file - promoters50/4901149
tttacag

SEQ ID NO: 194233 - DNA, 7 bp, Unknown
  misc_feature (1)..( 7): Result.006 file - promoters50/4901149
tttgcag

SEQ ID NO: 194234 - DNA, 8 bp, Unknown
  misc_feature (1)..( 8): Result.006 file - promoters50/4901149
tttaacaa

SEQ ID NO: 194235 - DNA, 8 bp, Unknown
  misc_feature (1)..( 8): Result.006 file - promoters50/4901149
tttaacat

SEQ ID NO: 194236 - DNA, 8 bp, Unknown
  misc_feature (1)..( 8): Result.006 file - promoters50/4901149
tttactta

SEQ ID NO: 194237 - DNA, 8 bp, Unknown
  misc_feature (1)..( 8): Result.006 file - promoters50/4901149
ttttcttt

SEQ ID NO: 194238 - DNA, 8 bp, Unknown
  misc_feature (1)..( 8): Result.006 file - promoters50/4901149
tattcttt

SEQ ID NO: 194239 - DNA, 9 bp, Unknown
  misc_feature (1)..( 9): Result.006 file - promoters50/4901149
aaatatagt

SEQ ID NO: 194240 - DNA, 9 bp, Unknown
  misc_feature (1)..( 9): Result.006 file - promoters50/4901149
agatatagt

SEQ ID NO: 194241 - DNA, 9 bp, Unknown
  misc_feature (1)..( 9): Result.006 file - promoters50/4901149
agagatatg

SEQ ID NO: 194242 - DNA, 8 bp, Unknown
  misc_feature (1)..( 8): Result.006 file - promoters50/4901149
gtactgta

SEQ ID NO: 194243 - DNA, 8 bp, Unknown
  misc_feature (1)..( 8): Result.006 file - promoters50/4901149
ttactgtc

SEQ ID NO: 194244 - DNA, 8 bp, Unknown
  misc_feature (1)..( 8): Result.006 file - promoters50/4901225
ttacagtc

SEQ ID NO: 194245 - DNA, 10 bp, Unknown
  misc_feature (1)..( 10): Result.006 file - promoters50/4901225
taaaaaaacg

SEQ ID NO: 194246 - DNA, 10 bp, Unknown
  misc_feature (1)..( 10): Result.006 file - promoters50/4901225
acaaaacacg

SEQ ID NO: 194247 - DNA, 10 bp, Unknown
  misc_feature (1)..( 10): Result.006 file - promoters50/4901241
acaatacact

SEQ ID NO: 194248 - DNA, 17 bp, Unknown
  misc_feature (1)..( 17): Result.006 file - promoters50/4901241
acatatttttataaata

SEQ ID NO: 194249 - DNA, 17 bp, Unknown
  misc_feature (1)..( 17): Result.006 file - promoters50/4901241
aaatatttttatgtggt

SEQ ID NO: 194250 - DNA, 17 bp, Unknown
  misc_feature (1)..( 17): Result.006 file - promoters50/4901241
aaatatatttaatcaga

SEQ ID NO: 194251 - DNA, 17 bp, Unknown
  misc_feature (1)..( 17): Result.006 file - promoters50/4901241
ttgaaattttatggata

SEQ ID NO: 194252 - DNA, 17 bp, Unknown
  misc_feature (1)..( 17): Result.006 file - promoters50/4901241
tgaaatattataataca

SEQ ID NO: 194253 - DNA, 17 bp, Unknown
  misc_feature (1)..( 17): Result.006 file - promoters50/4901241
aataatattcaaatcaa

SEQ ID NO: 194254 - DNA, 17 bp, Unknown
  misc_feature (1)..( 17): Result.006 file - promoters50/4901241
gcaaattttattgcttg

SEQ ID NO: 194255 - DNA, 17 bp, Unknown
  misc_feature (1)..( 17): Result.006 file - promoters50/4901241
gatcgctttaaactata

SEQ ID NO: 194256 - DNA, 13 bp, Unknown
  misc_feature (1)..( 13): Result.006 file - promoters50/4901241
aaaaaagaattta

SEQ ID NO: 194257 - DNA, 13 bp, Unknown
  misc_feature (1)..( 13): Result.006 file - promoters50/4901241
tcaaaagatttat

SEQ ID NO: 194258 - DNA, 14 bp, Unknown
  misc_feature (1)..( 14): Result.006 file - promoters50/4901241
aaaataagagatac

SEQ ID NO: 194259 - DNA, 14 bp, Unknown
  misc_feature (1)..( 14): Result.006 file - promoters50/4901241
agttaaagacttta

SEQ ID NO: 194260 - DNA, 14 bp, Unknown
  misc_feature (1)..( 14): Result.006 file - promoters50/4901241
tctgaaatattata

SEQ ID NO: 194261 - DNA, 14 bp, Unknown
  misc_feature (1)..( 14): Result.006 file - promoters50/4901241
tcgaaaatatacag

SEQ ID NO: 194262 - DNA, 12 bp, Unknown
  misc_feature (1)..( 12): Result.006 file - promoters50/4901241
cgattaaatgaa

SEQ ID NO: 194263 - DNA, 12 bp, Unknown
  misc_feature (1)..( 12): Result.006 file - promoters50/4901241
cgactaattaaa

SEQ ID NO: 194264 - DNA, 12 bp, Unknown
  misc_feature (1)..( 12): Result.006 file - promoters50/4901241
tgattaataatt

SEQ ID NO: 194265 - DNA, 12 bp, Unknown
  misc_feature (1)..( 12): Result.006 file - promoters50/4901241
agactaattaat

SEQ ID NO: 194266 - DNA, 12 bp, Unknown
  misc_feature (1)..( 12): Result.006 file - promoters50/4901241
attgtaaataat

SEQ ID NO: 194267 - DNA, 12 bp, Unknown
  misc_feature (1)..( 12): Result.006 file - promoters50/4901241
aaattaataaag

SEQ ID NO: 194268 - DNA, 14 bp, Unknown
  misc_feature (1)..( 14): Result.006 file - promoters50/4901241
cgattaaatgaaac

SEQ ID NO: 194269 - DNA, 14 bp, Unknown
  misc_feature (1)..( 14): Result.006 file - promoters50/4901241
ccgactaattaaat

SEQ ID NO: 194270 - DNA, 14 bp, Unknown
  misc_feature (1)..( 14): Result.006 file - promoters50/4901241
ctaattaatgaaac

SEQ ID NO: 194271 - DNA, 14 bp, Unknown
  misc_feature (1)..( 14): Result.006 file - promoters50/4901241
aattgtaaataatt

SEQ ID NO: 194272 - DNA, 14 bp, Unknown
  misc_feature (1)..( 14): Result.006 file - promoters50/4901241
tttaaaaattaata

SEQ ID NO: 194273 - DNA, 14 bp, Unknown
  misc_feature (1)..( 14): Result.006 file - promoters50/4901241
aattgtaaatatac

SEQ ID NO: 194274 - DNA, 19 bp, Unknown
  misc_feature (1)..( 19): Result.006 file - promoters50/4901241
aaagtaaaaaacatcttat

SEQ ID NO: 194275 - DNA, 19 bp, Unknown
  misc_feature (1)..( 19): Result.006 file - promoters50/4901241
aaatttttaaacattgtcc

SEQ ID NO: 194276 - DNA, 19 bp, Unknown
  misc_feature (1)..( 19): Result.006 file - promoters50/4901241
gagacttgcaacttcttat

SEQ ID NO: 194277 - DNA, 19 bp, Unknown
  misc_feature (1)..( 19): Result.006 file - promoters50/4901241
gatggattaatcataggag

SEQ ID NO: 194278 - DNA, 19 bp, Unknown
  misc_feature (1)..( 19): Result.006 file - promoters50/4901241
aaatttttaaatattttta

SEQ ID NO: 194279 - DNA, 19 bp, Unknown
  misc_feature (1)..( 19): Result.006 file - promoters50/4901241
gagaatctaaacttcgacc

SEQ ID NO: 194280 - DNA, 19 bp, Unknown
  misc_feature (1)..( 19): Result.006 file - promoters50/4901241
taattttaaaataatgaat

SEQ ID NO: 194281 - DNA, 12 bp, Unknown
  misc_feature (1)..( 12): Result.006 file - promoters50/4901241
taataaaatatc

SEQ ID NO: 194282 - DNA, 12 bp, Unknown
  misc_feature (1)..( 12): Result.006 file - promoters50/4901241
ttttaaattatg

SEQ ID NO: 194283 - DNA, 12 bp, Unknown
  misc_feature (1)..( 12): Result.006 file - promoters50/4901241
agatagaataaa

SEQ ID NO: 194284 - DNA, 12 bp, Unknown
  misc_feature (1)..( 12): Result.006 file - promoters50/4901241
cttaagaatacc

SEQ ID NO: 194285 - DNA, 12 bp, Unknown
  misc_feature (1)..( 12): Result.006 file - promoters50/4901241
gaaaaaaacaaa

SEQ ID NO: 194286 - DNA, 12 bp, Unknown
  misc_feature (1)..( 12): Result.006 file - promoters50/4901241
ttttttaacaaa

SEQ ID NO: 194287 - DNA, 12 bp, Unknown
  misc_feature (1)..( 12): Result.006 file - promoters50/4901241
cctaatttcttc

SEQ ID NO: 194288 - DNA, 12 bp, Unknown
  misc_feature (1)..( 12): Result.006 file - promoters50/4901241
cctaatttgagc

SEQ ID NO: 194289 - DNA, 12 bp, Unknown
  misc_feature (1)..( 12): Result.006 file - promoters50/4901241
tctattttgtcg

SEQ ID NO: 194290 - DNA, 12 bp, Unknown
  misc_feature (1)..( 12): Result.006 file - promoters50/4901241
ggaaatttcatt

SEQ ID NO: 194291 - DNA, 12 bp, Unknown
  misc_feature (1)..( 12): Result.006 file - promoters50/4901241
gcaaatttttaa

SEQ ID NO: 194292 - DNA, 12 bp, Unknown
  misc_feature (1)..( 12): Result.006 file - promoters50/4901241
tcaaatttaatt

SEQ ID NO: 194293 - DNA, 12 bp, Unknown
  misc_feature (1)..( 12): Result.006 file - promoters50/4901241
tctgtttgaaaa

SEQ ID NO: 194294 - DNA, 12 bp, Unknown
  misc_feature (1)..( 12): Result.006 file - promoters50/4901241
ataaatttgaaa

SEQ ID NO: 194295 - DNA, 13 bp, Unknown
  misc_feature (1)..( 13): Result.006 file - promoters50/4901241
cgttgaagaaaaa

SEQ ID NO: 194296 - DNA, 13 bp, Unknown
  misc_feature (1)..( 13): Result.006 file - promoters50/4901241
ggctgatgaaaaa

SEQ ID NO: 194297 - DNA, 13 bp, Unknown
  misc_feature (1)..( 13): Result.006 file - promoters50/4901241
atctgaagaaaaa

SEQ ID NO: 194298 - DNA, 13 bp, Unknown
  misc_feature (1)..( 13): Result.006 file - promoters50/4901241
taaatctgaaaat

SEQ ID NO: 194299 - DNA, 13 bp, Unknown
  misc_feature (1)..( 13): Result.006 file - promoters50/4901241
taaatttgaaaag

SEQ ID NO: 194300 - DNA, 13 bp, Unknown
  misc_feature (1)..( 13): Result.006 file - promoters50/4901241
cttctttgcaaat

SEQ ID NO: 194301 - DNA, 11 bp, Unknown
  misc_feature (1)..( 11): Result.006 file - promoters50/4901241
aaagaatttat

SEQ ID NO: 194302 - DNA, 11 bp, Unknown
  misc_feature (1)..( 11): Result.006 file - promoters50/4901241
gaagaatctga

SEQ ID NO: 194303 - DNA, 11 bp, Unknown
  misc_feature (1)..( 11): Result.006 file - promoters50/4901241
aaagactttag

SEQ ID NO: 194304 - DNA, 11 bp, Unknown
  misc_feature (1)..( 11): Result.006 file - promoters50/4901241
ttagaattaga

SEQ ID NO: 194305 - DNA, 11 bp, Unknown
  misc_feature (1)..( 11): Result.006 file - promoters50/4901241
tatgaataatt

SEQ ID NO: 194306 - DNA, 11 bp, Unknown
  misc_feature (1)..( 11): Result.006 file - promoters50/4901241
aataaattatt

SEQ ID NO: 194307 - DNA, 11 bp, Unknown
  misc_feature (1)..( 11): Result.006 file - promoters50/4901241
cgaaaatatac

SEQ ID NO: 194308 - DNA, 13 bp, Unknown
  misc_feature (1)..( 13): Result.006 file - promoters50/4901241
ataaaatgcacgt

SEQ ID NO: 194309 - DNA, 13 bp, Unknown
  misc_feature (1)..( 13): Result.006 file - promoters50/4901241
atacaataacctc

SEQ ID NO: 194310 - DNA, 12 bp, Unknown
  misc_feature (1)..( 12): Result.006 file - promoters50/4901241
taaaatataaat

SEQ ID NO: 194311 - DNA, 13 bp, Unknown
  misc_feature (1)..( 13): Result.006 file - promoters50/4901241
aaaaaatgtttga

SEQ ID NO: 194312 - DNA, 13 bp, Unknown
  misc_feature (1)..( 13): Result.006 file - promoters50/4901241
tgaaaatacaaat

SEQ ID NO: 194313 - DNA, 13 bp, Unknown
  misc_feature (1)..( 13): Result.006 file - promoters50/4901241
gaaaaattaaaat

SEQ ID NO: 194314 - DNA, 19 bp, Unknown
  misc_feature (1)..( 19): Result.006 file - promoters50/4901241
agtaaaaaaatcttggtca

SEQ ID NO: 194315 - DNA, 19 bp, Unknown
  misc_feature (1)..( 19): Result.006 file - promoters50/4901241
taataaacaataaattatt

SEQ ID NO: 194316 - DNA, 19 bp, Unknown
  misc_feature (1)..( 19): Result.006 file - promoters50/4901241
aaagaaaaaatatttttat

SEQ ID NO: 194317 - DNA, 19 bp, Unknown
  misc_feature (1)..( 19): Result.006 file - promoters50/4901241
agttaaaaaatcttgaaaa

SEQ ID NO: 194318 - DNA, 19 bp, Unknown
  misc_feature (1)..( 19): Result.006 file - promoters50/4901241
cttgaagaaatatttttat

SEQ ID NO: 194319 - DNA, 19 bp, Unknown
  misc_feature (1)..( 19): Result.006 file - promoters50/4901241
taatcagaaattagagatg

SEQ ID NO: 194320 - DNA, 19 bp, Unknown
  misc_feature (1)..( 19): Result.006 file - promoters50/4901241
caccctaagatctagaagc

SEQ ID NO: 194321 - DNA, 9 bp, Unknown
  misc_feature (1)..( 9): Result.006 file - promoters50/4901241
caaaaaaag

SEQ ID NO: 194322 - DNA, 9 bp, Unknown
  misc_feature (1)..( 9): Result.006 file - promoters50/4901241
taaaaaata

SEQ ID NO: 194323 - DNA, 9 bp, Unknown
  misc_feature (1)..( 9): Result.006 file - promoters50/4901241
gaaaaaaac

SEQ ID NO: 194324 - DNA, 9 bp, Unknown
  misc_feature (1)..( 9): Result.006 file - promoters50/4901241
gaaaatata

SEQ ID NO: 194325 - DNA, 9 bp, Unknown
  misc_feature (1)..( 9): Result.006 file - promoters50/4901241
gaaaatata

SEQ ID NO: 194326 - DNA, 9 bp, Unknown
  misc_feature (1)..( 9): Result.006 file - promoters50/4901241
gaaaatggc

SEQ ID NO: 194327 - DNA, 14 bp, Unknown
  misc_feature (1)..( 14): Result.006 file - promoters50/4901241
ctgaaaatacaaat

SEQ ID NO: 194328 - DNA, 14 bp, Unknown
  misc_feature (1)..( 14): Result.006 file - promoters50/4901241
attaaaatatattt

SEQ ID NO: 194329 - DNA, 12 bp, Unknown
  misc_feature (1)..( 12): Result.006 file - promoters50/4901241
taaaatataaat

SEQ ID NO: 194330 - DNA, 14 bp, Unknown
  misc_feature (1)..( 14): Result.006 file - promoters50/4901241
ttgataatatctga

SEQ ID NO: 194331 - DNA, 14 bp, Unknown
  misc_feature (1)..( 14): Result.006 file - promoters50/4901241
tttaaactatagtt

SEQ ID NO: 194332 - DNA, 14 bp, Unknown
  misc_feature (1)..( 14): Result.006 file - promoters50/4901241
attcaaatcaaaat

SEQ ID NO: 194333 - DNA, 16 bp, Unknown
  misc_feature (1)..( 16): Result.006 file - promoters50/4901241
tagtactatcgtttca

SEQ ID NO: 194334 - DNA, 16 bp, Unknown
  misc_feature (1)..( 16): Result.006 file - promoters50/4901241
ttaaactatagttgga

SEQ ID NO: 194335 - DNA, 16 bp, Unknown
  misc_feature (1)..( 16): Result.006 file - promoters50/4901241
ttaaaatatatttaat

SEQ ID NO: 194336 - DNA, 16 bp, Unknown
  misc_feature (1)..( 16): Result.006 file - promoters50/4901241
attcgatatatataat

SEQ ID NO: 194337 - DNA, 16 bp, Unknown
  misc_feature (1)..( 16): Result.006 file - promoters50/4901241
ctgaaatattataata

SEQ ID NO: 194338 - DNA, 16 bp, Unknown
  misc_feature (1)..( 16): Result.006 file - promoters50/4901516
aaaaaatatttttatt

SEQ ID NO: 194339 - DNA, 14 bp, Unknown
  misc_feature (1)..( 14): Result.006 file - promoters50/4901516
aatacaaacacatt

SEQ ID NO: 194340 - DNA, 14 bp, Unknown
  misc_feature (1)..( 14): Result.006 file - promoters50/4901516
gaaacaaaaacatt

SEQ ID NO: 194341 - DNA, 14 bp, Unknown
  misc_feature (1)..( 14): Result.006 file - promoters50/4901516
gaaagaaagctttg

SEQ ID NO: 194342 - DNA, 9 bp, Unknown
  misc_feature (1)..( 9): Result.006 file - promoters50/4901516
aacacaaaa

SEQ ID NO: 194343 - DNA, 9 bp, Unknown
  misc_feature (1)..( 9): Result.006 file - promoters50/4901516
cccactaaa

SEQ ID NO: 194344 - DNA, 9 bp, Unknown
  misc_feature (1)..( 9): Result.006 file - promoters50/4901516
cccactaga

SEQ ID NO: 194345 - DNA, 8 bp, Unknown
  misc_feature (1)..( 8): Result.006 file - promoters50/4901516
tatatatt

SEQ ID NO: 194346 - DNA, 8 bp, Unknown
  misc_feature (1)..( 8): Result.006 file - promoters50/4901516
tatttatt

SEQ ID NO: 194347 - DNA, 8 bp, Unknown
  misc_feature (1)..( 8): Result.006 file - promoters50/4901516
tatataaa

SEQ ID NO: 194348 - DNA, 10 bp, Unknown
  misc_feature (1)..( 10): Result.006 file - promoters50/4901516
tactaagata

SEQ ID NO: 194349 - DNA, 10 bp, Unknown
  misc_feature (1)..( 10): Result.006 file - promoters50/4901516
aaataaaata

SEQ ID NO: 194350 - DNA, 10 bp, Unknown
  misc_feature (1)..( 10): Result.006 file - promoters50/4901528
aaatgaaata

SEQ ID NO: 194351 - DNA, 13 bp, Unknown
  misc_feature (1)..( 13): Result.006 file - promoters50/4901528
taaattcaaaagc

SEQ ID NO: 194352 - DNA, 13 bp, Unknown
  misc_feature (1)..( 13): Result.006 file - promoters50/4901528
taaactcaaaatc

SEQ ID NO: 194353 - DNA, 13 bp, Unknown
  misc_feature (1)..( 13): Result.006 file - promoters50/4901528
aaaatccaatttg

SEQ ID NO: 194354 - DNA, 13 bp, Unknown
  misc_feature (1)..( 13): Result.006 file - promoters50/4901528
tacttccaagatc

SEQ ID NO: 194355 - DNA, 13 bp, Unknown
  misc_feature (1)..( 13): Result.006 file - promoters50/4901564
caaattcacaacc

SEQ ID NO: 194356 - DNA, 17 bp, Unknown
  misc_feature (1)..( 17): Result.006 file - promoters50/4901564
gatgataggcccattac

SEQ ID NO: 194357 - DNA, 17 bp, Unknown
  misc_feature (1)..( 17): Result.006 file - promoters50/4901564
atgtaaaagcccatcgt

SEQ ID NO: 194358 - DNA, 17 bp, Unknown
  misc_feature (1)..( 17): Result.006 file - promoters50/4901564
gcgtctctcccctttac

SEQ ID NO: 194359 - DNA, 17 bp, Unknown
  misc_feature (1)..( 17): Result.006 file - promoters50/4901564
aagcccaagcccactac

SEQ ID NO: 194360 - DNA, 17 bp, Unknown
  misc_feature (1)..( 17): Result.006 file - promoters50/4901564
aaggccaggcccataat

SEQ ID NO: 194361 - DNA, 17 bp, Unknown
  misc_feature (1)..( 17): Result.006 file - promoters50/4901564
cttaataagcccataat

SEQ ID NO: 194362 - DNA, 12 bp, Unknown
  misc_feature (1)..( 12): Result.006 file - promoters50/4901564
atttagatttgg

SEQ ID NO: 194363 - DNA, 12 bp, Unknown
  misc_feature (1)..( 12): Result.006 file - promoters50/4901564
attaagattgtg

SEQ ID NO: 194364 - DNA, 12 bp, Unknown
  misc_feature (1)..( 12): Result.006 file - promoters50/4901564
ttttaaattatt

SEQ ID NO: 194365 - DNA, 12 bp, Unknown
  misc_feature (1)..( 12): Result.006 file - promoters50/4901564
attaaggaaaca

SEQ ID NO: 194366 - DNA, 12 bp, Unknown
  misc_feature (1)..( 12): Result.006 file - promoters50/4901564
ctagagattgtg

SEQ ID NO: 194367 - DNA, 12 bp, Unknown
  misc_feature (1)..( 12): Result.006 file - promoters50/4901568
gttaagatctca

SEQ ID NO: 194368 - DNA, 9 bp, Unknown
  misc_feature (1)..( 9): Result.006 file - promoters50/4901568
gaagatcca

SEQ ID NO: 194369 - DNA, 9 bp, Unknown
  misc_feature (1)..( 9): Result.006 file - promoters50/4901568
gaagatgca

SEQ ID NO: 194370 - DNA, 9 bp, Unknown
  misc_feature (1)..( 9): Result.006 file - promoters50/4901568
aaagttgca

SEQ ID NO: 194371 - DNA, 6 bp, Unknown
  misc_feature (1)..( 6): Result.006 file - promoters50/4901568
tttgga

SEQ ID NO: 194372 - DNA, 6 bp, Unknown
  misc_feature (1)..( 6): Result.006 file - promoters50/4901568
tttgga

SEQ ID NO: 194373 - DNA, 6 bp, Unknown
  misc_feature (1)..( 6): Result.006 file - promoters50/4901568
tttgga

SEQ ID NO: 194374 - DNA, 11 bp, Unknown
  misc_feature (1)..( 11): Result.006 file - promoters50/4901568
gcataaatgaa

SEQ ID NO: 194375 - DNA, 11 bp, Unknown
  misc_feature (1)..( 11): Result.006 file - promoters50/4901568
gcaaaaaatgc

SEQ ID NO: 194376 - DNA, 11 bp, Unknown
  misc_feature (1)..( 11): Result.006 file - promoters50/4901592
aaataaatgaa

SEQ ID NO: 194377 - DNA, 9 bp, Unknown
  misc_feature (1)..( 9): Result.006 file - promoters50/4901592
attgttttg

SEQ ID NO: 194378 - DNA, 9 bp, Unknown
  misc_feature (1)..( 9): Result.006 file - promoters50/4901592
cctgtcttg

SEQ ID NO: 194379 - DNA, 9 bp, Unknown
  misc_feature (1)..( 9): Result.006 file - promoters50/4901592
tttgtttcg

SEQ ID NO: 194380 - DNA, 9 bp, Unknown
  misc_feature (1)..( 9): Result.006 file - promoters50/4901592
tttgttgac

SEQ ID NO: 194381 - DNA, 7 bp, Unknown
  misc_feature (1)..( 7): Result.006 file - promoters50/4901592
tttattg

SEQ ID NO: 194382 - DNA, 7 bp, Unknown
  misc_feature (1)..( 7): Result.006 file - promoters50/4901592
tttcttg

SEQ ID NO: 194383 - DNA, 7 bp, Unknown
  misc_feature (1)..( 7): Result.006 file - promoters50/4901592
tttgttg

SEQ ID NO: 194384 - DNA, 7 bp, Unknown
  misc_feature (1)..( 7): Result.006 file - promoters50/4901592
tttgttt

SEQ ID NO: 194385 - DNA, 8 bp, Unknown
  misc_feature (1)..( 8): Result.006 file - promoters50/4901592
ttttgtaa

SEQ ID NO: 194386 - DNA, 8 bp, Unknown
  misc_feature (1)..( 8): Result.006 file - promoters50/4901592
atttgtaa

SEQ ID NO: 194387 - DNA, 8 bp, Unknown
  misc_feature (1)..( 8): Result.006 file - promoters50/4901592
atttgttt

SEQ ID NO: 194388 - DNA, 8 bp, Unknown
  misc_feature (1)..( 8): Result.006 file - promoters50/4901673
gtttgttg

SEQ ID NO: 194389 - DNA, 7 bp, Unknown
  misc_feature (1)..( 7): Result.006 file - promoters50/4901673
aattcaa

SEQ ID NO: 194390 - DNA, 7 bp, Unknown
  misc_feature (1)..( 7): Result.006 file - promoters50/4901673
aattcat

SEQ ID NO: 194391 - DNA, 7 bp, Unknown
  misc_feature (1)..( 7): Result.006 file - promoters50/4901673
gattcaa

SEQ ID NO: 194392 - DNA, 9 bp, Unknown
  misc_feature (1)..( 9): Result.006 file - promoters50/4901673
tatttaagc

SEQ ID NO: 194393 - DNA, 9 bp, Unknown
  misc_feature (1)..( 9): Result.006 file - promoters50/4901673
tatttaatt

SEQ ID NO: 194394 - DNA, 9 bp, Unknown
  misc_feature (1)..( 9): Result.006 file - promoters50/4901673
gttttcagc

SEQ ID NO: 194395 - DNA, 13 bp, Unknown
  misc_feature (1)..( 13): Result.006 file - promoters50/4901673
ttcttagctacgt

SEQ ID NO: 194396 - DNA, 13 bp, Unknown
  misc_feature (1)..( 13): Result.006 file - promoters50/4901673
ttcctagatacag

SEQ ID NO: 194397 - DNA, 13 bp, Unknown
  misc_feature (1)..( 13): Result.006 file - promoters50/4901673
gattccgatccag

SEQ ID NO: 194398 - DNA, 8 bp, Unknown
  misc_feature (1)..( 8): Result.006 file - promoters50/4901673
tttcaata

SEQ ID NO: 194399 - DNA, 8 bp, Unknown
  misc_feature (1)..( 8): Result.006 file - promoters50/4901673
attccata

SEQ ID NO: 194400 - DNA, 8 bp, Unknown
  misc_feature (1)..( 8): Result.006 file - promoters50/4901736
attccagc

SEQ ID NO: 194401 - DNA, 11 bp, Unknown
  misc_feature (1)..( 11): Result.006 file - promoters50/4901736
aagtttgtttg

SEQ ID NO: 194402 - DNA, 11 bp, Unknown
  misc_feature (1)..( 11): Result.006 file - promoters50/4901736
taggttgtttt

SEQ ID NO: 194403 - DNA, 11 bp, Unknown
  misc_feature (1)..( 11): Result.006 file - promoters50/4901736
atgattgtttt

SEQ ID NO: 194404 - DNA, 11 bp, Unknown
  misc_feature (1)..( 11): Result.006 file - promoters50/4901736
ataattttttt

SEQ ID NO: 194405 - DNA, 11 bp, Unknown
  misc_feature (1)..( 11): Result.006 file - promoters50/4901736
taaattttggt

SEQ ID NO: 194406 - DNA, 11 bp, Unknown
  misc_feature (1)..( 11): Result.006 file - promoters50/4901736
caaatttgtct

SEQ ID NO: 194407 - DNA, 13 bp, Unknown
  misc_feature (1)..( 13): Result.006 file - promoters50/4901736
caaagtttgtttg

SEQ ID NO: 194408 - DNA, 13 bp, Unknown
  misc_feature (1)..( 13): Result.006 file - promoters50/4901736
taaattttggtaa

SEQ ID NO: 194409 - DNA, 13 bp, Unknown
  misc_feature (1)..( 13): Result.006 file - promoters50/4901736
tttattttagatt

SEQ ID NO: 194410 - DNA, 13 bp, Unknown
  misc_feature (1)..( 13): Result.006 file - promoters50/4901736
tttcttttaccct

SEQ ID NO: 194411 - DNA, 13 bp, Unknown
  misc_feature (1)..( 13): Result.006 file - promoters50/4901736
attgttttggttg

SEQ ID NO: 194412 - DNA, 13 bp, Unknown
  misc_feature (1)..( 13): Result.006 file - promoters50/4901736
caaatttgtctca

SEQ ID NO: 194413 - DNA, 13 bp, Unknown
  misc_feature (1)..( 13): Result.006 file - promoters50/4901736
aagactttgggtg

SEQ ID NO: 194414 - DNA, 10 bp, Unknown
  misc_feature (1)..( 10): Result.006 file - promoters50/4901736
atggcccaat

SEQ ID NO: 194415 - DNA, 10 bp, Unknown
  misc_feature (1)..( 10): Result.006 file - promoters50/4901736
taggcccata

SEQ ID NO: 194416 - DNA, 10 bp, Unknown
  misc_feature (1)..( 10): Result.006 file - promoters50/4901736
aaggcccaat

SEQ ID NO: 194417 - DNA, 10 bp, Unknown
  misc_feature (1)..( 10): Result.006 file - promoters50/4901736
aaggcccaaa

SEQ ID NO: 194418 - DNA, 10 bp, Unknown
  misc_feature (1)..( 10): Result.006 file - promoters50/4901736
tgggccgaat

SEQ ID NO: 194419 - DNA, 10 bp, Unknown
  misc_feature (1)..( 10): Result.006 file - promoters50/4901793
aagaccctaa

SEQ ID NO: 194420 - DNA, 8 bp, Unknown
  misc_feature (1)..( 8): Result.006 file - promoters50/4901793
taacttat

SEQ ID NO: 194421 - DNA, 8 bp, Unknown
  misc_feature (1)..( 8): Result.006 file - promoters50/4901793
taaattac

SEQ ID NO: 194422 - DNA, 8 bp, Unknown
  misc_feature (1)..( 8): Result.006 file - promoters50/4901822
aaacatat

SEQ ID NO: 194423 - DNA, 10 bp, Unknown
  misc_feature (1)..( 10): Result.006 file - promoters50/4901822
tgagtcaata

SEQ ID NO: 194424 - DNA, 10 bp, Unknown
  misc_feature (1)..( 10): Result.006 file - promoters50/4901822
tgaatcaata

SEQ ID NO: 194425 - DNA, 10 bp, Unknown
  misc_feature (1)..( 10): Result.006 file - promoters50/4901822
tgattcaaaa

SEQ ID NO: 194426 - DNA, 10 bp, Unknown
  misc_feature (1)..( 10): Result.006 file - promoters50/4901822
atggtttttg

SEQ ID NO: 194427 - DNA, 10 bp, Unknown
  misc_feature (1)..( 10): Result.006 file - promoters50/4901822
aaggtgtttg

SEQ ID NO: 194428 - DNA, 10 bp, Unknown
  misc_feature (1)..( 10): Result.006 file - promoters50/4901822
atgatttgag

SEQ ID NO: 194429 - DNA, 7 bp, Unknown
  misc_feature (1)..( 7): Result.006 file - promoters50/4901822
catgtga

SEQ ID NO: 194430 - DNA, 7 bp, Unknown
  misc_feature (1)..( 7): Result.006 file - promoters50/4901822
catttga

SEQ ID NO: 194431 - DNA, 7 bp, Unknown
  misc_feature (1)..( 7): Result.006 file - promoters50/4901822
aatgtga

SEQ ID NO: 194432 - DNA, 8 bp, Unknown
  misc_feature (1)..( 8): Result.006 file - promoters50/4901822
ttaaccct

SEQ ID NO: 194433 - DNA, 8 bp, Unknown
  misc_feature (1)..( 8): Result.006 file - promoters50/4901822
ttaacctt

SEQ ID NO: 194434 - DNA, 8 bp, Unknown
  misc_feature (1)..( 8): Result.006 file - promoters50/4901823
ctaatctt

SEQ ID NO: 194435 - DNA, 11 bp, Unknown
  misc_feature (1)..( 11): Result.006 file - promoters50/4901823
attttttttgt

SEQ ID NO: 194436 - DNA, 11 bp, Unknown
  misc_feature (1)..( 11): Result.006 file - promoters50/4901823
atttttcagtc

SEQ ID NO: 194437 - DNA, 11 bp, Unknown
  misc_feature (1)..( 11): Result.006 file - promoters50/4901823
tttttttgtgt

SEQ ID NO: 194438 - DNA, 10 bp, Unknown
  misc_feature (1)..( 10): Result.006 file - promoters50/4901823
ttgcattttt

SEQ ID NO: 194439 - DNA, 10 bp, Unknown
  misc_feature (1)..( 10): Result.006 file - promoters50/4901823
ttgaattttt

SEQ ID NO: 194440 - DNA, 10 bp, Unknown
  misc_feature (1)..( 10): Result.006 file - promoters50/4901842
ttgtattcac

SEQ ID NO: 194441 - DNA, 8 bp, Unknown
  misc_feature (1)..( 8): Result.006 file - promoters50/4901842
ggaaaaaa

SEQ ID NO: 194442 - DNA, 8 bp, Unknown
  misc_feature (1)..( 8): Result.006 file - promoters50/4901842
ggaagaaa

SEQ ID NO: 194443 - DNA, 8 bp, Unknown
  misc_feature (1)..( 8): Result.006 file - promoters50/4901842
aaaagaaa

SEQ ID NO: 194444 - DNA, 7 bp, Unknown
  misc_feature (1)..( 7): Result.006 file - promoters50/4901842
caaatag

SEQ ID NO: 194445 - DNA, 7 bp, Unknown
  misc_feature (1)..( 7): Result.006 file - promoters50/4901842
caaataa

SEQ ID NO: 194446 - DNA, 7 bp, Unknown
  misc_feature (1)..( 7): Result.006 file - promoters50/4901842
caagtaa

SEQ ID NO: 194447 - DNA, 8 bp, Unknown
  misc_feature (1)..( 8): Result.006 file - promoters50/4901842
taaagcaa

SEQ ID NO: 194448 - DNA, 8 bp, Unknown
  misc_feature (1)..( 8): Result.006 file - promoters50/4901842
taaggcac

SEQ ID NO: 194449 - DNA, 8 bp, Unknown
  misc_feature (1)..( 8): Result.006 file - promoters50/4901884
caaagcaa

SEQ ID NO: 194450 - DNA, 10 bp, Unknown
  misc_feature (1)..( 10): Result.006 file - promoters50/4901884
aaaaaactta

SEQ ID NO: 194451 - DNA, 10 bp, Unknown
  misc_feature (1)..( 10): Result.006 file - promoters50/4901884
ataaaacttt

SEQ ID NO: 194452 - DNA, 10 bp, Unknown
  misc_feature (1)..( 10): Result.006 file - promoters50/4901884
aaaaaaatta

SEQ ID NO: 194453 - DNA, 10 bp, Unknown
  misc_feature (1)..( 10): Result.006 file - promoters50/4901884
ctaaaaacgg

SEQ ID NO: 194454 - DNA, 10 bp, Unknown
  misc_feature (1)..( 10): Result.006 file - promoters50/4901884
agaaaacaat

SEQ ID NO: 194455 - DNA, 12 bp, Unknown
  misc_feature (1)..( 12): Result.006 file - promoters50/4901884
tgagatactaaa

SEQ ID NO: 194456 - DNA, 12 bp, Unknown
  misc_feature (1)..( 12): Result.006 file - promoters50/4901884
tgagacactttc

SEQ ID NO: 194457 - DNA, 12 bp, Unknown
  misc_feature (1)..( 12): Result.006 file - promoters50/4901884
aaaaataataaa

SEQ ID NO: 194458 - DNA, 12 bp, Unknown
  misc_feature (1)..( 12): Result.006 file - promoters50/4901884
gcaaaaaatgat

SEQ ID NO: 194459 - DNA, 12 bp, Unknown
  misc_feature (1)..( 12): Result.006 file - promoters50/4901884
gaaaacaatctt

SEQ ID NO: 194460 - DNA, 12 bp, Unknown
  misc_feature (1)..( 12): Result.006 file - promoters50/4901884
atataaagaaaa

SEQ ID NO: 194461 - DNA, 12 bp, Unknown
  misc_feature (1)..( 12): Result.006 file - promoters50/4901884
aacaaaacaaac

SEQ ID NO: 194462 - DNA, 12 bp, Unknown
  misc_feature (1)..( 12): Result.006 file - promoters50/4901884
tttgaaagaagt

SEQ ID NO: 194463 - DNA, 12 bp, Unknown
  misc_feature (1)..( 12): Result.006 file - promoters50/4901884
aacaaaacaaaa

SEQ ID NO: 194464 - DNA, 12 bp, Unknown
  misc_feature (1)..( 12): Result.006 file - promoters50/4902029
caaactacaaaa

SEQ ID NO: 194465 - DNA, 10 bp, Unknown
  misc_feature (1)..( 10): Result.006 file - promoters50/4902029
ctttttattt

SEQ ID NO: 194466 - DNA, 10 bp, Unknown
  misc_feature (1)..( 10): Result.006 file - promoters50/4902029
aattttgttt

SEQ ID NO: 194467 - DNA, 10 bp, Unknown
  misc_feature (1)..( 10): Result.006 file - promoters50/4902029
ctttttaact

SEQ ID NO: 194468 - DNA, 7 bp, Unknown
  misc_feature (1)..( 7): Result.006 file - promoters50/4902029
cattaaa

SEQ ID NO: 194469 - DNA, 7 bp, Unknown
  misc_feature (1)..( 7): Result.006 file - promoters50/4902029
cataaaa

SEQ ID NO: 194470 - DNA, 7 bp, Unknown
  misc_feature (1)..( 7): Result.006 file - promoters50/4902029
cataaag

SEQ ID NO: 194471 - DNA, 14 bp, Unknown
  misc_feature (1)..( 14): Result.006 file - promoters50/4902029
tattagtctttttc

SEQ ID NO: 194472 - DNA, 14 bp, Unknown
  misc_feature (1)..( 14): Result.006 file - promoters50/4902029
actatatgtttttc

SEQ ID NO: 194473 - DNA, 14 bp, Unknown
  misc_feature (1)..( 14): Result.006 file - promoters50/4902038
tttacttctcttta

SEQ ID NO: 194474 - DNA, 8 bp, Unknown
  misc_feature (1)..( 8): Result.006 file - promoters50/4902038
tgaaaact

SEQ ID NO: 194475 - DNA, 8 bp, Unknown
  misc_feature (1)..( 8): Result.006 file - promoters50/4902038
ataaaact

SEQ ID NO: 194476 - DNA, 8 bp, Unknown
  misc_feature (1)..( 8): Result.006 file - promoters50/4902038
tgagaact

SEQ ID NO: 194477 - DNA, 7 bp, Unknown
  misc_feature (1)..( 7): Result.006 file - promoters50/4902038
tacgaaa

SEQ ID NO: 194478 - DNA, 7 bp, Unknown
  misc_feature (1)..( 7): Result.006 file - promoters50/4902038
cacgaaa

SEQ ID NO: 194479 - DNA, 7 bp, Unknown
  misc_feature (1)..( 7): Result.006 file - promoters50/4902082
cactaaa

SEQ ID NO: 194480 - DNA, 13 bp, Unknown
  misc_feature (1)..( 13): Result.006 file - promoters50/4902082
ttccttcacattg

SEQ ID NO: 194481 - DNA, 13 bp, Unknown
  misc_feature (1)..( 13): Result.006 file - promoters50/4902082
agtattcccatta

SEQ ID NO: 194482 - DNA, 13 bp, Unknown
  misc_feature (1)..( 13): Result.006 file - promoters50/4902082
ttccctcacattg

SEQ ID NO: 194483 - DNA, 8 bp, Unknown
  misc_feature (1)..( 8): Result.006 file - promoters50/4902082
gtaaattt

SEQ ID NO: 194484 - DNA, 8 bp, Unknown
  misc_feature (1)..( 8): Result.006 file - promoters50/4902082
ataatttt

SEQ ID NO: 194485 - DNA, 9 bp, Unknown
  misc_feature (1)..( 9): Result.006 file - promoters50/4902143
ataatgttt

SEQ ID NO: 194486 - DNA, 7 bp, Unknown
  misc_feature (1)..( 7): Result.006 file - promoters50/4902143
cggttta

SEQ ID NO: 194487 - DNA, 7 bp, Unknown
  misc_feature (1)..( 7): Result.006 file - promoters50/4902143
tggttta

SEQ ID NO: 194488 - DNA, 7 bp, Unknown
  misc_feature (1)..( 7): Result.006 file - promoters50/4902387
atgtttt

SEQ ID NO: 194489 - DNA, 11 bp, Unknown
  misc_feature (1)..( 11): Result.006 file - promoters50/4902387
atctaaataaa

SEQ ID NO: 194490 - DNA, 11 bp, Unknown
  misc_feature (1)..( 11): Result.006 file - promoters50/4902387
atctgaatact

SEQ ID NO: 194491 - DNA, 11 bp, Unknown
  misc_feature (1)..( 11): Result.006 file - promoters50/4902387
tattaaacaaa

SEQ ID NO: 194492 - DNA, 11 bp, Unknown
  misc_feature (1)..( 11): Result.006 file - promoters50/4902387
aaatgaattta

SEQ ID NO: 194493 - DNA, 11 bp, Unknown
  misc_feature (1)..( 11): Result.006 file - promoters50/4902387
tgctgaatctt

SEQ ID NO: 194494 - DNA, 11 bp, Unknown
  misc_feature (1)..( 11): Result.006 file - promoters50/4902387
taggcaacaaa

SEQ ID NO: 194495 - DNA, 9 bp, Unknown
  misc_feature (1)..( 9): Result.006 file - promoters50/4902387
caatgttta

SEQ ID NO: 194496 - DNA, 9 bp, Unknown
  misc_feature (1)..( 9): Result.006 file - promoters50/4902387
aaatgttga

SEQ ID NO: 194497 - DNA, 9 bp, Unknown
  misc_feature (1)..( 9): Result.006 file - promoters50/4902387
acatgtttt

SEQ ID NO: 194498 - DNA, 9 bp, Unknown
  misc_feature (1)..( 9): Result.006 file - promoters50/4902387
caatgatta

SEQ ID NO: 194499 - DNA, 9 bp, Unknown
  misc_feature (1)..( 9): Result.006 file - promoters50/4902387
tcatgttta

SEQ ID NO: 194500 - DNA, 9 bp, Unknown
  misc_feature (1)..( 9): Result.006 file - promoters50/4902425
tcattttta

SEQ ID NO: 194501 - DNA, 9 bp, Unknown
  misc_feature (1)..( 9): Result.006 file - promoters50/4902425
ccactacac

SEQ ID NO: 194502 - DNA, 9 bp, Unknown
  misc_feature (1)..( 9): Result.006 file - promoters50/4902425
ccactacat

SEQ ID NO: 194503 - DNA, 9 bp, Unknown
  misc_feature (1)..( 9): Result.006 file - promoters50/4902456
tcactccat

SEQ ID NO: 194504 - DNA, 10 bp, Unknown
  misc_feature (1)..( 10): Result.006 file - promoters50/4902456
acatatgttt

SEQ ID NO: 194505 - DNA, 10 bp, Unknown
  misc_feature (1)..( 10): Result.006 file - promoters50/4902456
ctatatgtat

SEQ ID NO: 194506 - DNA, 10 bp, Unknown
  misc_feature (1)..( 10): Result.006 file - promoters50/4902456
cactatcttt

SEQ ID NO: 194507 - DNA, 10 bp, Unknown
  misc_feature (1)..( 10): Result.006 file - promoters50/4902456
caccatctcc

SEQ ID NO: 194508 - DNA, 9 bp, Unknown
  misc_feature (1)..( 9): Result.006 file - promoters50/4902456
taaaaaaca

SEQ ID NO: 194509 - DNA, 9 bp, Unknown
  misc_feature (1)..( 9): Result.006 file - promoters50/4902456
gaaaaaaca

SEQ ID NO: 194510 - DNA, 9 bp, Unknown
  misc_feature (1)..( 9): Result.006 file - promoters50/4902456
gaaaaaaga

SEQ ID NO: 194511 - DNA, 9 bp, Unknown
  misc_feature (1)..( 9): Result.006 file - promoters50/4902456
ataaaaaca

SEQ ID NO: 194512 - DNA, 9 bp, Unknown
  misc_feature (1)..( 9): Result.006 file - promoters50/4902456
gaaattata

SEQ ID NO: 194513 - DNA, 9 bp, Unknown
  misc_feature (1)..( 9): Result.006 file - promoters50/4902456
aaaaatatc

SEQ ID NO: 194514 - DNA, 9 bp, Unknown
  misc_feature (1)..( 9): Result.006 file - promoters50/4902456
aaaaataag

SEQ ID NO: 194515 - DNA, 9 bp, Unknown
  misc_feature (1)..( 9): Result.006 file - promoters50/4902456
gaaaacaag

SEQ ID NO: 194516 - DNA, 7 bp, Unknown
  misc_feature (1)..( 7): Result.006 file - promoters50/4902456
aaaaaag

SEQ ID NO: 194517 - DNA, 7 bp, Unknown
  misc_feature (1)..( 7): Result.006 file - promoters50/4902456
aaagaag

SEQ ID NO: 194518 - DNA, 7 bp, Unknown
  misc_feature (1)..( 7): Result.006 file - promoters50/4902456
aaaaaaa

SEQ ID NO: 194519 - DNA, 8 bp, Unknown
  misc_feature (1)..( 8): Result.006 file - promoters50/4902456
ggatattc

SEQ ID NO: 194520 - DNA, 8 bp, Unknown
  misc_feature (1)..( 8): Result.006 file - promoters50/4902456
agatatta

SEQ ID NO: 194521 - DNA, 8 bp, Unknown
  misc_feature (1)..( 8): Result.006 file - promoters50/4902456
agatattt

SEQ ID NO: 194522 - DNA, 8 bp, Unknown
  misc_feature (1)..( 8): Result.006 file - promoters50/4902456
agatttta

SEQ ID NO: 194523 - DNA, 8 bp, Unknown
  misc_feature (1)..( 8): Result.006 file - promoters50/4902456
aaatagat

SEQ ID NO: 194524 - DNA, 8 bp, Unknown
  misc_feature (1)..( 8): Result.006 file - promoters50/4902456
aaaaagag

SEQ ID NO: 194525 - DNA, 8 bp, Unknown
  misc_feature (1)..( 8): Result.006 file - promoters50/4902456
gaattgat

SEQ ID NO: 194526 - DNA, 9 bp, Unknown
  misc_feature (1)..( 9): Result.006 file - promoters50/4902456
taattttat

SEQ ID NO: 194527 - DNA, 9 bp, Unknown
  misc_feature (1)..( 9): Result.006 file - promoters50/4902456
tttttttat

SEQ ID NO: 194528 - DNA, 10 bp, Unknown
  misc_feature (1)..( 10): Result.006 file - promoters50/4902791
ctttttctat

SEQ ID NO: 194529 - DNA, 10 bp, Unknown
  misc_feature (1)..( 10): Result.006 file - promoters50/4902791
aatattttta

SEQ ID NO: 194530 - DNA, 10 bp, Unknown
  misc_feature (1)..( 10): Result.006 file - promoters50/4902791
gatatttttg

SEQ ID NO: 194531 - DNA, 10 bp, Unknown
  misc_feature (1)..( 10): Result.006 file - promoters50/4902791
tccattttta

SEQ ID NO: 194532 - DNA, 10 bp, Unknown
  misc_feature (1)..( 10): Result.006 file - promoters50/4902791
gtaatttttg

SEQ ID NO: 194533 - DNA, 10 bp, Unknown
  misc_feature (1)..( 10): Result.006 file - promoters50/4902791
gccactttga

SEQ ID NO: 194534 - DNA, 10 bp, Unknown
  misc_feature (1)..( 10): Result.006 file - promoters50/4903159
gccactgagt

SEQ ID NO: 194535 - DNA, 13 bp, Unknown
  misc_feature (1)..( 13): Result.006 file - promoters50/4903159
tcggtttaaataa

SEQ ID NO: 194536 - DNA, 13 bp, Unknown
  misc_feature (1)..( 13): Result.006 file - promoters50/4903159
attagttaaataa

SEQ ID NO: 194537 - DNA, 13 bp, Unknown
  misc_feature (1)..( 13): Result.006 file - promoters50/4903159
atttgttaaactg

SEQ ID NO: 194538 - DNA, 13 bp, Unknown
  misc_feature (1)..( 13): Result.006 file - promoters50/4903171
tattgttaatata

SEQ ID NO: 194539 - DNA, 9 bp, Unknown
  misc_feature (1)..( 9): Result.006 file - promoters50/4903171
atatgattt

SEQ ID NO: 194540 - DNA, 9 bp, Unknown
  misc_feature (1)..( 9): Result.006 file - promoters50/4903171
atatgattt

SEQ ID NO: 194541 - DNA, 7 bp, Unknown
  misc_feature (1)..( 7): Result.006 file - promoters50/4903171
atgtttt

SEQ ID NO: 194542 - DNA, 8 bp, Unknown
  misc_feature (1)..( 8): Result.006 file - promoters50/4903171
tcttcgaa

SEQ ID NO: 194543 - DNA, 8 bp, Unknown
  misc_feature (1)..( 8): Result.006 file - promoters50/4903171
acttagaa

SEQ ID NO: 194544 - DNA, 8 bp, Unknown
  misc_feature (1)..( 8): Result.006 file - promoters50/4903171
actaagaa

SEQ ID NO: 194545 - DNA, 8 bp, Unknown
  misc_feature (1)..( 8): Result.006 file - promoters50/4903171
gaaaaatc

SEQ ID NO: 194546 - DNA, 8 bp, Unknown
  misc_feature (1)..( 8): Result.006 file - promoters50/4903171
gaaaaatg

SEQ ID NO: 194547 - DNA, 8 bp, Unknown
  misc_feature (1)..( 8): Result.006 file - promoters50/4903171
ttaaaatc

SEQ ID NO: 194548 - DNA, 7 bp, Unknown
  misc_feature (1)..( 7): Result.006 file - promoters50/4903171
gattgga

SEQ ID NO: 194549 - DNA, 7 bp, Unknown
  misc_feature (1)..( 7): Result.006 file - promoters50/4903171
aattgga

SEQ ID NO: 194550 - DNA, 7 bp, Unknown
  misc_feature (1)..( 7): Result.006 file - promoters50/4903178
gattgga

SEQ ID NO: 194551 - DNA, 10 bp, Unknown
  misc_feature (1)..( 10): Result.006 file - promoters50/4903178
agataaataa

SEQ ID NO: 194552 - DNA, 10 bp, Unknown
  misc_feature (1)..( 10): Result.006 file - promoters50/4903178
aattaaatat

SEQ ID NO: 194553 - DNA, 10 bp, Unknown
  misc_feature (1)..( 10): Result.006 file - promoters50/4903178
ttctaattaa

SEQ ID NO: 194554 - DNA, 10 bp, Unknown
  misc_feature (1)..( 10): Result.006 file - promoters50/4903178
gattaattac

SEQ ID NO: 194555 - DNA, 11 bp, Unknown
  misc_feature (1)..( 11): Result.006 file - promoters50/4903178
actctgtattc

SEQ ID NO: 194556 - DNA, 11 bp, Unknown
  misc_feature (1)..( 11): Result.006 file - promoters50/4903178
tttctttattc

SEQ ID NO: 194557 - DNA, 11 bp, Unknown
  misc_feature (1)..( 11): Result.006 file - promoters50/4903178
actctgtctaa

SEQ ID NO: 194558 - DNA, 11 bp, Unknown
  misc_feature (1)..( 11): Result.006 file - promoters50/4903407
tgtatgcatta

SEQ ID NO: 194559 - DNA, 16 bp, Unknown
  misc_feature (1)..( 16): Result.006 file - promoters50/4903407
ataaaaatatattaat

SEQ ID NO: 194560 - DNA, 16 bp, Unknown
  misc_feature (1)..( 16): Result.006 file - promoters50/4903407
ccaaagatatatctga

SEQ ID NO: 194561 - DNA, 16 bp, Unknown
  misc_feature (1)..( 16): Result.006 file - promoters50/4903407
cttataatttatagtc

SEQ ID NO: 194562 - DNA, 16 bp, Unknown
  misc_feature (1)..( 16): Result.006 file - promoters50/4903407
tgacaaatttattgtt

SEQ ID NO: 194563 - DNA, 16 bp, Unknown
  misc_feature (1)..( 16): Result.006 file - promoters50/4903407
acagctttctatgtct

SEQ ID NO: 194564 - DNA, 16 bp, Unknown
  misc_feature (1)..( 16): Result.006 file - promoters50/4903407
ccaaaaataatagtaa

SEQ ID NO: 194565 - DNA, 16 bp, Unknown
  misc_feature (1)..( 16): Result.006 file - promoters50/4903407
aataaactaaacactg

SEQ ID NO: 194566 - DNA, 9 bp, Unknown
  misc_feature (1)..( 9): Result.006 file - promoters50/4903407
tttctttat

SEQ ID NO: 194567 - DNA, 9 bp, Unknown
  misc_feature (1)..( 9): Result.006 file - promoters50/4903407
tttatttat

SEQ ID NO: 194568 - DNA, 9 bp, Unknown
  misc_feature (1)..( 9): Result.006 file - promoters50/4903407
tttattttt

SEQ ID NO: 194569 - DNA, 9 bp, Unknown
  misc_feature (1)..( 9): Result.006 file - promoters50/4903407
tttcttgta

SEQ ID NO: 194570 - DNA, 9 bp, Unknown
  misc_feature (1)..( 9): Result.006 file - promoters50/4903407
tttgtttta

SEQ ID NO: 194571 - DNA, 9 bp, Unknown
  misc_feature (1)..( 9): Result.006 file - promoters50/4903407
tttatctcc

SEQ ID NO: 194572 - DNA, 9 bp, Unknown
  misc_feature (1)..( 9): Result.006 file - promoters50/4903407
agttattta

SEQ ID NO: 194573 - DNA, 9 bp, Unknown
  misc_feature (1)..( 9): Result.006 file - promoters50/4903407
gtttatttt

SEQ ID NO: 194574 - DNA, 9 bp, Unknown
  misc_feature (1)..( 9): Result.006 file - promoters50/4903407
cattatttt

SEQ ID NO: 194575 - DNA, 9 bp, Unknown
  misc_feature (1)..( 9): Result.006 file - promoters50/4903407
cattgtttt

SEQ ID NO: 194576 - DNA, 9 bp, Unknown
  misc_feature (1)..( 9): Result.006 file - promoters50/4903407
ccatatttt

SEQ ID NO: 194577 - DNA, 9 bp, Unknown
  misc_feature (1)..( 9): Result.006 file - promoters50/4903407
gtttattac

SEQ ID NO: 194578 - DNA, 12 bp, Unknown
  misc_feature (1)..( 12): Result.006 file - promoters50/4903407
aattaaaactat

SEQ ID NO: 194579 - DNA, 12 bp, Unknown
  misc_feature (1)..( 12): Result.006 file - promoters50/4903407
ttttaaaaatgt

SEQ ID NO: 194580 - DNA, 12 bp, Unknown
  misc_feature (1)..( 12): Result.006 file - promoters50/4903407
gtttataaccaa

SEQ ID NO: 194581 - DNA, 12 bp, Unknown
  misc_feature (1)..( 12): Result.006 file - promoters50/4903407
aaataaactaaa

SEQ ID NO: 194582 - DNA, 12 bp, Unknown
  misc_feature (1)..( 12): Result.006 file - promoters50/4903407
tcctaaaatagt

SEQ ID NO: 194583 - DNA, 12 bp, Unknown
  misc_feature (1)..( 12): Result.006 file - promoters50/4903407
aaataaatcgta

SEQ ID NO: 194584 - DNA, 15 bp, Unknown
  misc_feature (1)..( 15): Result.006 file - promoters50/4903407
acaaattaaaactat

SEQ ID NO: 194585 - DNA, 15 bp, Unknown
  misc_feature (1)..( 15): Result.006 file - promoters50/4903407
caaaaataatagtaa

SEQ ID NO: 194586 - DNA, 15 bp, Unknown
  misc_feature (1)..( 15): Result.006 file - promoters50/4903407
gaaaaataaactaaa

SEQ ID NO: 194587 - DNA, 16 bp, Unknown
  misc_feature (1)..( 16): Result.006 file - promoters50/4903407
ccaaagatatatctga

SEQ ID NO: 194588 - DNA, 16 bp, Unknown
  misc_feature (1)..( 16): Result.006 file - promoters50/4903407
cctaaaatagtttcaa

SEQ ID NO: 194589 - DNA, 16 bp, Unknown
  misc_feature (1)..( 16): Result.006 file - promoters50/4903407
gtaaatatatttgaga

SEQ ID NO: 194590 - DNA, 16 bp, Unknown
  misc_feature (1)..( 16): Result.006 file - promoters50/4903614
ttcgaaataaatgaca

SEQ ID NO: 194591 - DNA, 10 bp, Unknown
  misc_feature (1)..( 10): Result.006 file - promoters50/4903614
acaatttaaa

SEQ ID NO: 194592 - DNA, 10 bp, Unknown
  misc_feature (1)..( 10): Result.006 file - promoters50/4903614
ttaatataaa

SEQ ID NO: 194593 - DNA, 10 bp, Unknown
  misc_feature (1)..( 10): Result.006 file - promoters50/4903653
ttattataaa

SEQ ID NO: 194594 - DNA, 10 bp, Unknown
  misc_feature (1)..( 10): Result.006 file - promoters50/4903653
cttgtatacg

SEQ ID NO: 194595 - DNA, 10 bp, Unknown
  misc_feature (1)..( 10): Result.006 file - promoters50/4903653
tttgtatttc

SEQ ID NO: 194596 - DNA, 10 bp, Unknown
  misc_feature (1)..( 10): Result.006 file - promoters50/4903653
tttgtttttc

SEQ ID NO: 194597 - DNA, 10 bp, Unknown
  misc_feature (1)..( 10): Result.006 file - promoters50/4903653
tttgtaaaaa

SEQ ID NO: 194598 - DNA, 12 bp, Unknown
  misc_feature (1)..( 12): Result.006 file - promoters50/4903653
ttaaaaaaaaaa

SEQ ID NO: 194599 - DNA, 12 bp, Unknown
  misc_feature (1)..( 12): Result.006 file - promoters50/4903653
acaaaacaaaaa

SEQ ID NO: 194600 - DNA, 12 bp, Unknown
  misc_feature (1)..( 12): Result.006 file - promoters50/4903653
ttataaaaacga

SEQ ID NO: 194601 - DNA, 12 bp, Unknown
  misc_feature (1)..( 12): Result.006 file - promoters50/4906473
ggccaaaaaccc

SEQ ID NO: 194602 - DNA, 8 bp, Unknown
  misc_feature (1)..( 8): Result.006 file - promoters50/4906473
ttttgaaa

SEQ ID NO: 194603 - DNA, 8 bp, Unknown
  misc_feature (1)..( 8): Result.006 file - promoters50/4906473
tttggaag

SEQ ID NO: 194604 - DNA, 8 bp, Unknown
  misc_feature (1)..( 8): Result.006 file - promoters50/4907396
tgtggaag

SEQ ID NO: 194605 - DNA, 11 bp, Unknown
  misc_feature (1)..( 11): Result.006 file - promoters50/4907396
atctatagtcg

SEQ ID NO: 194606 - DNA, 11 bp, Unknown
  misc_feature (1)..( 11): Result.006 file - promoters50/4907396
atctttagtta

SEQ ID NO: 194607 - DNA, 11 bp, Unknown
  misc_feature (1)..( 11): Result.006 file - promoters50/4909449
tttcttaatta

SEQ ID NO: 194608 - DNA, 10 bp, Unknown
  misc_feature (1)..( 10): Result.006 file - promoters50/4909449
ttattaataa

SEQ ID NO: 194609 - DNA, 10 bp, Unknown
  misc_feature (1)..( 10): Result.006 file - promoters50/4909449
ctatttatac

SEQ ID NO: 194610 - DNA, 10 bp, Unknown
  misc_feature (1)..( 10): Result.006 file - promoters50/4909449
gtaataataa

SEQ ID NO: 194611 - DNA, 10 bp, Unknown
  misc_feature (1)..( 10): Result.006 file - promoters50/4909449
atataaatac

SEQ ID NO: 194612 - DNA, 10 bp, Unknown
  misc_feature (1)..( 10): Result.006 file - promoters50/4909449
atacaaaacc

SEQ ID NO: 194613 - DNA, 10 bp, Unknown
  misc_feature (1)..( 10): Result.006 file - promoters50/4909449
atataaaacg

SEQ ID NO: 194614 - DNA, 11 bp, Unknown
  misc_feature (1)..( 11): Result.006 file - promoters50/4909449
caatcaaatcg

SEQ ID NO: 194615 - DNA, 11 bp, Unknown
  misc_feature (1)..( 11): Result.006 file - promoters50/4909449
ttgtcaaatga

SEQ ID NO: 194616 - DNA, 11 bp, Unknown
  misc_feature (1)..( 11): Result.006 file - promoters50/4909449
gaataaaaaca

SEQ ID NO: 194617 - DNA, 11 bp, Unknown
  misc_feature (1)..( 11): Result.006 file - promoters50/4909449
caaacaaaaca

SEQ ID NO: 194618 - DNA, 11 bp, Unknown
  misc_feature (1)..( 11): Result.006 file - promoters50/4909449
gagtcaaagaa

SEQ ID NO: 194619 - DNA, 11 bp, Unknown
  misc_feature (1)..( 11): Result.006 file - promoters50/4909449
aagaaaaaaaa

SEQ ID NO: 194620 - DNA, 16 bp, Unknown
  misc_feature (1)..( 16): Result.006 file - promoters50/4909449
tcgtatataaagacgc

SEQ ID NO: 194621 - DNA, 16 bp, Unknown
  misc_feature (1)..( 16): Result.006 file - promoters50/4909449
tataatataaaggtcc

SEQ ID NO: 194622 - DNA, 16 bp, Unknown
  misc_feature (1)..( 16): Result.006 file - promoters50/4909449
ttactattaaagccgc

SEQ ID NO: 194623 - DNA, 16 bp, Unknown
  misc_feature (1)..( 16): Result.006 file - promoters50/4909449
aagcatataaagtcat

SEQ ID NO: 194624 - DNA, 16 bp, Unknown
  misc_feature (1)..( 16): Result.006 file - promoters50/4909449
tccactataaattcaa

SEQ ID NO: 194625 - DNA, 16 bp, Unknown
  misc_feature (1)..( 16): Result.006 file - promoters50/4909449
cactatttaaagctcg

SEQ ID NO: 194626 - DNA, 16 bp, Unknown
  misc_feature (1)..( 16): Result.006 file - promoters50/4910180
cactatataaagacaa

SEQ ID NO: 194627 - DNA, 10 bp, Unknown
  misc_feature (1)..( 10): Result.006 file - promoters50/4910180
ttgaatttga

SEQ ID NO: 194628 - DNA, 10 bp, Unknown
  misc_feature (1)..( 10): Result.006 file - promoters50/4910180
ttgcatttga

SEQ ID NO: 194629 - DNA, 10 bp, Unknown
  misc_feature (1)..( 10): Result.006 file - promoters50/4910180
ttgaatatac

SEQ ID NO: 194630 - DNA, 11 bp, Unknown
  misc_feature (1)..( 11): Result.006 file - promoters50/4910180
aaagttactat

SEQ ID NO: 194631 - DNA, 11 bp, Unknown
  misc_feature (1)..( 11): Result.006 file - promoters50/4910180
aaagtgactca

SEQ ID NO: 194632 - DNA, 11 bp, Unknown
  misc_feature (1)..( 11): Result.006 file - promoters50/4910287
taatttattat

SEQ ID NO: 194633 - DNA, 11 bp, Unknown
  misc_feature (1)..( 11): Result.006 file - promoters50/4910287
ttatttttttt

SEQ ID NO: 194634 - DNA, 11 bp, Unknown
  misc_feature (1)..( 11): Result.006 file - promoters50/4910287
ttatttactta

SEQ ID NO: 194635 - DNA, 11 bp, Unknown
  misc_feature (1)..( 11): Result.006 file - promoters50/4910298
ttaattaatta

SEQ ID NO: 194636 - DNA, 10 bp, Unknown
  misc_feature (1)..( 10): Result.006 file - promoters50/4910298
atttttctaa

SEQ ID NO: 194637 - DNA, 10 bp, Unknown
  misc_feature (1)..( 10): Result.006 file - promoters50/4910298
ctctttctaa

SEQ ID NO: 194638 - DNA, 10 bp, Unknown
  misc_feature (1)..( 10): Result.006 file - promoters50/4910298
atttttttaa

SEQ ID NO: 194639 - DNA, 9 bp, Unknown
  misc_feature (1)..( 9): Result.006 file - promoters50/4910298
ttttttgga

SEQ ID NO: 194640 - DNA, 9 bp, Unknown
  misc_feature (1)..( 9): Result.006 file - promoters50/4910298
ttttttaaa

SEQ ID NO: 194641 - DNA, 9 bp, Unknown
  misc_feature (1)..( 9): Result.006 file - promoters50/4910298
tttattaaa

SEQ ID NO: 194642 - DNA, 7 bp, Unknown
  misc_feature (1)..( 7): Result.006 file - promoters50/4910298
acaaaaa

SEQ ID NO: 194643 - DNA, 7 bp, Unknown
  misc_feature (1)..( 7): Result.006 file - promoters50/4910298
acaaaag

SEQ ID NO: 194644 - DNA, 7 bp, Unknown
  misc_feature (1)..( 7): Result.006 file - promoters50/4910298
gcaaaag

SEQ ID NO: 194645 - DNA, 8 bp, Unknown
  misc_feature (1)..( 8): Result.006 file - promoters50/4910298
aaaaagtt

SEQ ID NO: 194646 - DNA, 8 bp, Unknown
  misc_feature (1)..( 8): Result.006 file - promoters50/4910298
caaaagtt

SEQ ID NO: 194647 - DNA, 8 bp, Unknown
  misc_feature (1)..( 8): Result.006 file - promoters50/4910362
caaaagaa

SEQ ID NO: 194648 - DNA, 8 bp, Unknown
  misc_feature (1)..( 8): Result.006 file - promoters50/4910362
atttgtct

SEQ ID NO: 194649 - DNA, 8 bp, Unknown
  misc_feature (1)..( 8): Result.006 file - promoters50/4910362
atttatct

SEQ ID NO: 194650 - DNA, 8 bp, Unknown
  misc_feature (1)..( 8): Result.006 file - promoters50/4910362
ttttgtca

SEQ ID NO: 194651 - DNA, 7 bp, Unknown
  misc_feature (1)..( 7): Result.006 file - promoters50/4910362
ctctttg

SEQ ID NO: 194652 - DNA, 7 bp, Unknown
  misc_feature (1)..( 7): Result.006 file - promoters50/4910362
ttctttg

SEQ ID NO: 194653 - DNA, 7 bp, Unknown
  misc_feature (1)..( 7): Result.006 file - promoters50/4910362
ttcattg

SEQ ID NO: 194654 - DNA, 7 bp, Unknown
  misc_feature (1)..( 7): Result.006 file - promoters50/4910362
ttctttc

SEQ ID NO: 194655 - DNA, 9 bp, Unknown
  misc_feature (1)..( 9): Result.006 file - promoters50/4910362
aatatacta

SEQ ID NO: 194656 - DNA, 9 bp, Unknown
  misc_feature (1)..( 9): Result.006 file - promoters50/4910362
aatttactt

SEQ ID NO: 194657 - DNA, 9 bp, Unknown
  misc_feature (1)..( 9): Result.006 file - promoters50/4910362
tctttgctt

SEQ ID NO: 194658 - DNA, 7 bp, Unknown
  misc_feature (1)..( 7): Result.006 file - promoters50/4910362
ttttgta

SEQ ID NO: 194659 - DNA, 7 bp, Unknown
  misc_feature (1)..( 7): Result.006 file - promoters50/4910362
atttgta

SEQ ID NO: 194660 - DNA, 7 bp, Unknown
  misc_feature (1)..( 7): Result.006 file - promoters50/4910362
ttttgta

SEQ ID NO: 194661 - DNA, 10 bp, Unknown
  misc_feature (1)..( 10): Result.006 file - promoters50/4910362
gaaaaaagaa

SEQ ID NO: 194662 - DNA, 10 bp, Unknown
  misc_feature (1)..( 10): Result.006 file - promoters50/4910362
gaaaaaatct

SEQ ID NO: 194663 - DNA, 10 bp, Unknown
  misc_feature (1)..( 10): Result.006 file - promoters50/4910362
caaaatagaa

SEQ ID NO: 194664 - DNA, 7 bp, Unknown
  misc_feature (1)..( 7): Result.006 file - promoters50/4910362
gtttttt

SEQ ID NO: 194665 - DNA, 7 bp, Unknown
  misc_feature (1)..( 7): Result.006 file - promoters50/4910362
gttcttt

SEQ ID NO: 194666 - DNA, 7 bp, Unknown
  misc_feature (1)..( 7): Result.006 file - promoters50/4910362
tttcttt

SEQ ID NO: 194667 - DNA, 12 bp, Unknown
  misc_feature (1)..( 12): Result.006 file - promoters50/4910362
ttgaccttattt

SEQ ID NO: 194668 - DNA, 12 bp, Unknown
  misc_feature (1)..( 12): Result.006 file - promoters50/4910362
ttgcccttataa

SEQ ID NO: 194669 - DNA, 12 bp, Unknown
  misc_feature (1)..( 12): Result.006 file - promoters50/4910362
caaaccctattt

SEQ ID NO: 194670 - DNA, 10 bp, Unknown
  misc_feature (1)..( 10): Result.006 file - promoters50/4910362
ttttctataa

SEQ ID NO: 194671 - DNA, 10 bp, Unknown
  misc_feature (1)..( 10): Result.006 file - promoters50/4910362
tttcctaagt

SEQ ID NO: 194672 - DNA, 10 bp, Unknown
  misc_feature (1)..( 10): Result.006 file - promoters50/4910366
cctccaaagt

SEQ ID NO: 194673 - DNA, 18 bp, Unknown
  misc_feature (1)..( 18): Result.006 file - promoters50/4910366
ttttttaacaaatttcta

SEQ ID NO: 194674 - DNA, 18 bp, Unknown
  misc_feature (1)..( 18): Result.006 file - promoters50/4910366
ggttttaatcgaatggta

SEQ ID NO: 194675 - DNA, 18 bp, Unknown
  misc_feature (1)..( 18): Result.006 file - promoters50/4910366
gattttaaaaaaaaaaag

SEQ ID NO: 194676 - DNA, 18 bp, Unknown
  misc_feature (1)..( 18): Result.006 file - promoters50/4910366
atatttaatcagaaatta

SEQ ID NO: 194677 - DNA, 18 bp, Unknown
  misc_feature (1)..( 18): Result.006 file - promoters50/4910366
tgctataaaaaaacaaag

SEQ ID NO: 194678 - DNA, 18 bp, Unknown
  misc_feature (1)..( 18): Result.006 file - promoters50/4910366
gatgttatgattcactaa

SEQ ID NO: 194679 - DNA, 11 bp, Unknown
  misc_feature (1)..( 11): Result.006 file - promoters50/4910366
gaaagaagaag

SEQ ID NO: 194680 - DNA, 11 bp, Unknown
  misc_feature (1)..( 11): Result.006 file - promoters50/4910366
caaacaagaaa

SEQ ID NO: 194681 - DNA, 11 bp, Unknown
  misc_feature (1)..( 11): Result.006 file - promoters50/4910366
gaaagaaagag

SEQ ID NO: 194682 - DNA, 11 bp, Unknown
  misc_feature (1)..( 11): Result.006 file - promoters50/4910366
taaagaaacgc

SEQ ID NO: 194683 - DNA, 11 bp, Unknown
  misc_feature (1)..( 11): Result.006 file - promoters50/4910366
taaaaaaatgg

SEQ ID NO: 194684 - DNA, 11 bp, Unknown
  misc_feature (1)..( 11): Result.006 file - promoters50/4910417
aaaagaaatgg

SEQ ID NO: 194685 - DNA, 8 bp, Unknown
  misc_feature (1)..( 8): Result.006 file - promoters50/4910417
ctacaaga

SEQ ID NO: 194686 - DNA, 8 bp, Unknown
  misc_feature (1)..( 8): Result.006 file - promoters50/4910417
ctacaaaa

SEQ ID NO: 194687 - DNA, 8 bp, Unknown
  misc_feature (1)..( 8): Result.006 file - promoters50/4910426
ttacaaaa

SEQ ID NO: 194688 - DNA, 11 bp, Unknown
  misc_feature (1)..( 11): Result.006 file - promoters50/4910426
ctatatatata

SEQ ID NO: 194689 - DNA, 11 bp, Unknown
  misc_feature (1)..( 11): Result.006 file - promoters50/4910426
ctatatataca

SEQ ID NO: 194690 - DNA, 11 bp, Unknown
  misc_feature (1)..( 11): Result.006 file - promoters50/4910426
gtatttattaa

SEQ ID NO: 194691 - DNA, 11 bp, Unknown
  misc_feature (1)..( 11): Result.006 file - promoters50/4910426
ctataaatata

SEQ ID NO: 194692 - DNA, 11 bp, Unknown
  misc_feature (1)..( 11): Result.006 file - promoters50/4910426
ctatatataaa

SEQ ID NO: 194693 - DNA, 11 bp, Unknown
  misc_feature (1)..( 11): Result.006 file - promoters50/4910426
gtatataaata

SEQ ID NO: 194694 - DNA, 11 bp, Unknown
  misc_feature (1)..( 11): Result.006 file - promoters50/4910426
atataaatttg

SEQ ID NO: 194695 - DNA, 12 bp, Unknown
  misc_feature (1)..( 12): Result.006 file - promoters50/4910426
ttaattattgtt

SEQ ID NO: 194696 - DNA, 12 bp, Unknown
  misc_feature (1)..( 12): Result.006 file - promoters50/4910426
ttatttatacaa

SEQ ID NO: 194697 - DNA, 12 bp, Unknown
  misc_feature (1)..( 12): Result.006 file - promoters50/4910426
acaattatcgac

SEQ ID NO: 194698 - DNA, 12 bp, Unknown
  misc_feature (1)..( 12): Result.006 file - promoters50/4910426
ttaattttctca

SEQ ID NO: 194699 - DNA, 12 bp, Unknown
  misc_feature (1)..( 12): Result.006 file - promoters50/4910426
atatttaaatcc

SEQ ID NO: 194700 - DNA, 12 bp, Unknown
  misc_feature (1)..( 12): Result.006 file - promoters50/4910426
cacattatcgat

SEQ ID NO: 194701 - DNA, 12 bp, Unknown
  misc_feature (1)..( 12): Result.006 file - promoters50/4910426
ttaatttttgac

SEQ ID NO: 194702 - DNA, 12 bp, Unknown
  misc_feature (1)..( 12): Result.006 file - promoters50/4910426
ctgtgtatggat

SEQ ID NO: 194703 - DNA, 10 bp, Unknown
  misc_feature (1)..( 10): Result.006 file - promoters50/4910426
aaaatattta

SEQ ID NO: 194704 - DNA, 10 bp, Unknown
  misc_feature (1)..( 10): Result.006 file - promoters50/4910426
caaatattaa

SEQ ID NO: 194705 - DNA, 10 bp, Unknown
  misc_feature (1)..( 10): Result.006 file - promoters50/4910426
agaatattct

SEQ ID NO: 194706 - DNA, 10 bp, Unknown
  misc_feature (1)..( 10): Result.006 file - promoters50/4910426
aaaagatttt

SEQ ID NO: 194707 - DNA, 10 bp, Unknown
  misc_feature (1)..( 10): Result.006 file - promoters50/4910426
caattatcga

SEQ ID NO: 194708 - DNA, 10 bp, Unknown
  misc_feature (1)..( 10): Result.006 file - promoters50/4910874
acattatcga

SEQ ID NO: 194709 - DNA, 13 bp, Unknown
  misc_feature (1)..( 13): Result.006 file - promoters50/4910874
gttgagtcttccg

SEQ ID NO: 194710 - DNA, 13 bp, Unknown
  misc_feature (1)..( 13): Result.006 file - promoters50/4910874
attgagttttcat

SEQ ID NO: 194711 - DNA, 13 bp, Unknown
  misc_feature (1)..( 13): Result.006 file - promoters50/4910874
tgtgagttttatg

SEQ ID NO: 194712 - DNA, 13 bp, Unknown
  misc_feature (1)..( 13): Result.006 file - promoters50/4910874
acaatgttttcac

SEQ ID NO: 194713 - DNA, 13 bp, Unknown
  misc_feature (1)..( 13): Result.006 file - promoters50/4910874
attgagataacgc

SEQ ID NO: 194714 - DNA, 13 bp, Unknown
  misc_feature (1)..( 13): Result.006 file - promoters50/4910874
ttttcgtttaaca

SEQ ID NO: 194715 - DNA, 13 bp, Unknown
  misc_feature (1)..( 13): Result.006 file - promoters50/4910874
gtaaattttgcac

SEQ ID NO: 194716 - DNA, 13 bp, Unknown
  misc_feature (1)..( 13): Result.006 file - promoters50/4910874
catttatttaact

SEQ ID NO: 194717 - DNA, 14 bp, Unknown
  misc_feature (1)..( 14): Result.006 file - promoters50/4910874
ccaagaaagttata

SEQ ID NO: 194718 - DNA, 14 bp, Unknown
  misc_feature (1)..( 14): Result.006 file - promoters50/4910874
aggagacagtgaaa

SEQ ID NO: 194719 - DNA, 14 bp, Unknown
  misc_feature (1)..( 14): Result.006 file - promoters50/4910874
ataagaaagtaaac

SEQ ID NO: 194720 - DNA, 14 bp, Unknown
  misc_feature (1)..( 14): Result.006 file - promoters50/4910874
tcttcaaaattata

SEQ ID NO: 194721 - DNA, 14 bp, Unknown
  misc_feature (1)..( 14): Result.006 file - promoters50/4910874
tcaaaaaaaaaagt

SEQ ID NO: 194722 - DNA, 14 bp, Unknown
  misc_feature (1)..( 14): Result.006 file - promoters50/4910874
tcaaaacgacgtaa

SEQ ID NO: 194723 - DNA, 9 bp, Unknown
  misc_feature (1)..( 9): Result.006 file - promoters50/4910874
agttttatg

SEQ ID NO: 194724 - DNA, 9 bp, Unknown
  misc_feature (1)..( 9): Result.006 file - promoters50/4910874
gttttcatg

SEQ ID NO: 194725 - DNA, 9 bp, Unknown
  misc_feature (1)..( 9): Result.006 file - promoters50/4910874
acttttatt

SEQ ID NO: 194726 - DNA, 9 bp, Unknown
  misc_feature (1)..( 9): Result.006 file - promoters50/4910874
atttttgtt

SEQ ID NO: 194727 - DNA, 9 bp, Unknown
  misc_feature (1)..( 9): Result.006 file - promoters50/4910874
gttttcaca

SEQ ID NO: 194728 - DNA, 9 bp, Unknown
  misc_feature (1)..( 9): Result.006 file - promoters50/4910874
ttttgcact

SEQ ID NO: 194729 - DNA, 9 bp, Unknown
  misc_feature (1)..( 9): Result.006 file - promoters50/4910902
gcatttatt

SEQ ID NO: 194730 - DNA, 8 bp, Unknown
  misc_feature (1)..( 8): Result.006 file - promoters50/4910902
cttcatga

SEQ ID NO: 194731 - DNA, 8 bp, Unknown
  misc_feature (1)..( 8): Result.006 file - promoters50/4910902
gatcatga

SEQ ID NO: 194732 - DNA, 8 bp, Unknown
  misc_feature (1)..( 8): Result.006 file - promoters50/4910902
cttgatga

SEQ ID NO: 194733 - DNA, 9 bp, Unknown
  misc_feature (1)..( 9): Result.006 file - promoters50/4910902
ttaaattaa

SEQ ID NO: 194734 - DNA, 9 bp, Unknown
  misc_feature (1)..( 9): Result.006 file - promoters50/4910902
ttatattta

SEQ ID NO: 194735 - DNA, 9 bp, Unknown
  misc_feature (1)..( 9): Result.006 file - promoters50/4910902
ctatgttta

SEQ ID NO: 194736 - DNA, 7 bp, Unknown
  misc_feature (1)..( 7): Result.006 file - promoters50/4910902
atattta

SEQ ID NO: 194737 - DNA, 7 bp, Unknown
  misc_feature (1)..( 7): Result.006 file - promoters50/4910902
ttattta

SEQ ID NO: 194738 - DNA, 7 bp, Unknown
  misc_feature (1)..( 7): Result.006 file - promoters50/4910949
atatttg

SEQ ID NO: 194739 - DNA, 8 bp, Unknown
  misc_feature (1)..( 8): Result.006 file - promoters50/4910949
tttcttgt

SEQ ID NO: 194740 - DNA, 8 bp, Unknown
  misc_feature (1)..( 8): Result.006 file - promoters50/4910949
actcttgt

SEQ ID NO: 194741 - DNA, 8 bp, Unknown
  misc_feature (1)..( 8): Result.006 file - promoters50/4910949
ttttttgg

SEQ ID NO: 194742 - DNA, 7 bp, Unknown
  misc_feature (1)..( 7): Result.006 file - promoters50/4910949
tatgatt

SEQ ID NO: 194743 - DNA, 7 bp, Unknown
  misc_feature (1)..( 7): Result.006 file - promoters50/4910949
tatgatt

SEQ ID NO: 194744 - DNA, 7 bp, Unknown
  misc_feature (1)..( 7): Result.006 file - promoters50/4910949
tattatt

SEQ ID NO: 194745 - DNA, 8 bp, Unknown
  misc_feature (1)..( 8): Result.006 file - promoters50/4910949
cttgtgtt

SEQ ID NO: 194746 - DNA, 8 bp, Unknown
  misc_feature (1)..( 8): Result.006 file - promoters50/4910949
attgagtt

SEQ ID NO: 194747 - DNA, 8 bp, Unknown
  misc_feature (1)..( 8): Result.006 file - promoters50/4910949
cttgtgga

SEQ ID NO: 194748 - DNA, 15 bp, Unknown
  misc_feature (1)..( 15): Result.006 file - promoters50/4910949
ttgtggtgtgtattg

SEQ ID NO: 194749 - DNA, 15 bp, Unknown
  misc_feature (1)..( 15): Result.006 file - promoters50/4910949
ttttattgtttatca

SEQ ID NO: 194750 - DNA, 15 bp, Unknown
  misc_feature (1)..( 15): Result.006 file - promoters50/4910949
ataataaatttatca

SEQ ID NO: 194751 - DNA, 15 bp, Unknown
  misc_feature (1)..( 15): Result.006 file - promoters50/4910949
tttttttgttttttt

SEQ ID NO: 194752 - DNA, 11 bp, Unknown
  misc_feature (1)..( 11): Result.006 file - promoters50/4910949
ttgctttcttc

SEQ ID NO: 194753 - DNA, 11 bp, Unknown
  misc_feature (1)..( 11): Result.006 file - promoters50/4910949
aagctttctgt

SEQ ID NO: 194754 - DNA, 11 bp, Unknown
  misc_feature (1)..( 11): Result.006 file - promoters50/4910949
ttgtttttttt

SEQ ID NO: 194755 - DNA, 11 bp, Unknown
  misc_feature (1)..( 11): Result.006 file - promoters50/4910949
accttttggtt

SEQ ID NO: 194756 - DNA, 11 bp, Unknown
  misc_feature (1)..( 11): Result.006 file - promoters50/4910949
aacaccttttg

SEQ ID NO: 194757 - DNA, 11 bp, Unknown
  misc_feature (1)..( 11): Result.006 file - promoters50/4910949
aacaactttta

SEQ ID NO: 194758 - DNA, 11 bp, Unknown
  misc_feature (1)..( 11): Result.006 file - promoters50/4910949
taaggcttttg

SEQ ID NO: 194759 - DNA, 9 bp, Unknown
  misc_feature (1)..( 9): Result.006 file - promoters50/4910949
ctacgtttt

SEQ ID NO: 194760 - DNA, 9 bp, Unknown
  misc_feature (1)..( 9): Result.006 file - promoters50/4910949
ctacctttt

SEQ ID NO: 194761 - DNA, 9 bp, Unknown
  misc_feature (1)..( 9): Result.006 file - promoters50/4910949
tcacctttt

SEQ ID NO: 194762 - DNA, 10 bp, Unknown
  misc_feature (1)..( 10): Result.006 file - promoters50/4910949
cgttttgtgg

SEQ ID NO: 194763 - DNA, 10 bp, Unknown
  misc_feature (1)..( 10): Result.006 file - promoters50/4910949
ttttttgttt

SEQ ID NO: 194764 - DNA, 11 bp, Unknown
  misc_feature (1)..( 11): Result.006 file - promoters50/4910949
ttttattgttt

SEQ ID NO: 194765 - DNA, 11 bp, Unknown
  misc_feature (1)..( 11): Result.006 file - promoters50/4910949
ccttttggttc

SEQ ID NO: 194766 - DNA, 11 bp, Unknown
  misc_feature (1)..( 11): Result.006 file - promoters50/4910949
atcgtggccgt

SEQ ID NO: 194767 - DNA, 11 bp, Unknown
  misc_feature (1)..( 11): Result.006 file - promoters50/4910949
tacttggtcgt

SEQ ID NO: 194768 - DNA, 11 bp, Unknown
  misc_feature (1)..( 11): Result.006 file - promoters50/4911303
tactttgtcaa

SEQ ID NO: 194769 - DNA, 8 bp, Unknown
  misc_feature (1)..( 8): Result.006 file - promoters50/4911303
tttaagaa

SEQ ID NO: 194770 - DNA, 8 bp, Unknown
  misc_feature (1)..( 8): Result.006 file - promoters50/4911303
tttaagtt

SEQ ID NO: 194771 - DNA, 8 bp, Unknown
  misc_feature (1)..( 8): Result.006 file - promoters50/4911303
gttaggaa

SEQ ID NO: 194772 - DNA, 7 bp, Unknown
  misc_feature (1)..( 7): Result.006 file - promoters50/4911303
taattta

SEQ ID NO: 194773 - DNA, 7 bp, Unknown
  misc_feature (1)..( 7): Result.006 file - promoters50/4911303
caattta

SEQ ID NO: 194774 - DNA, 7 bp, Unknown
  misc_feature (1)..( 7): Result.006 file - promoters50/4911303
taagtta

SEQ ID NO: 194775 - DNA, 11 bp, Unknown
  misc_feature (1)..( 11): Result.006 file - promoters50/4911303
agaggaaatga

SEQ ID NO: 194776 - DNA, 11 bp, Unknown
  misc_feature (1)..( 11): Result.006 file - promoters50/4911303
agagtaaataa

SEQ ID NO: 194777 - DNA, 11 bp, Unknown
  misc_feature (1)..( 11): Result.006 file - promoters50/4911303
tcttgaagtga

SEQ ID NO: 194778 - DNA, 9 bp, Unknown
  misc_feature (1)..( 9): Result.006 file - promoters50/4911303
tctatttaa

SEQ ID NO: 194779 - DNA, 9 bp, Unknown
  misc_feature (1)..( 9): Result.006 file - promoters50/4911303
tcttttttt

SEQ ID NO: 194780 - DNA, 9 bp, Unknown
  misc_feature (1)..( 9): Result.006 file - promoters50/4911303
tctaattaa

SEQ ID NO: 194781 - DNA, 8 bp, Unknown
  misc_feature (1)..( 8): Result.006 file - promoters50/4911303
tttttatt

SEQ ID NO: 194782 - DNA, 8 bp, Unknown
  misc_feature (1)..( 8): Result.006 file - promoters50/4911303
gtttaatt

SEQ ID NO: 194783 - DNA, 9 bp, Unknown
  misc_feature (1)..( 9): Result.006 file - promoters50/4911303
ttttctatt

SEQ ID NO: 194784 - DNA, 10 bp, Unknown
  misc_feature (1)..( 10): Result.006 file - promoters50/4911303
taacagaaaa

SEQ ID NO: 194785 - DNA, 10 bp, Unknown
  misc_feature (1)..( 10): Result.006 file - promoters50/4911303
taacagagat

SEQ ID NO: 194786 - DNA, 10 bp, Unknown
  misc_feature (1)..( 10): Result.006 file - promoters50/4911309
atacagagat

SEQ ID NO: 194787 - DNA, 10 bp, Unknown
  misc_feature (1)..( 10): Result.006 file - promoters50/4911309
ttcttttgag

SEQ ID NO: 194788 - DNA, 10 bp, Unknown
  misc_feature (1)..( 10): Result.006 file - promoters50/4911309
ttcatttgaa

SEQ ID NO: 194789 - DNA, 10 bp, Unknown
  misc_feature (1)..( 10): Result.006 file - promoters50/4911309
gacttttagt

SEQ ID NO: 194790 - DNA, 8 bp, Unknown
  misc_feature (1)..( 8): Result.006 file - promoters50/4911309
tctcctta

SEQ ID NO: 194791 - DNA, 8 bp, Unknown
  misc_feature (1)..( 8): Result.006 file - promoters50/4911309
tcttctta

SEQ ID NO: 194792 - DNA, 8 bp, Unknown
  misc_feature (1)..( 8): Result.006 file - promoters50/4911309
gcttatta

SEQ ID NO: 194793 - DNA, 12 bp, Unknown
  misc_feature (1)..( 12): Result.006 file - promoters50/4911309
caaaatttcttg

SEQ ID NO: 194794 - DNA, 12 bp, Unknown
  misc_feature (1)..( 12): Result.006 file - promoters50/4911309
caacattgcttg

SEQ ID NO: 194795 - DNA, 12 bp, Unknown
  misc_feature (1)..( 12): Result.006 file - promoters50/4911309
gaaagttttctc

SEQ ID NO: 194796 - DNA, 6 bp, Unknown
  misc_feature (1)..( 6): Result.006 file - promoters50/4911309
ttttct

SEQ ID NO: 194797 - DNA, 6 bp, Unknown
  misc_feature (1)..( 6): Result.006 file - promoters50/4911309
ttttct

SEQ ID NO: 194798 - DNA, 6 bp, Unknown
  misc_feature (1)..( 6): Result.006 file - promoters50/4911309
ttttct

SEQ ID NO: 194799 - DNA, 8 bp, Unknown
  misc_feature (1)..( 8): Result.006 file - promoters50/4911309
atgcttat

SEQ ID NO: 194800 - DNA, 8 bp, Unknown
  misc_feature (1)..( 8): Result.006 file - promoters50/4911309
atgtttat

SEQ ID NO: 194801 - DNA, 8 bp, Unknown
  misc_feature (1)..( 8): Result.006 file - promoters50/4911309
cttcttac

SEQ ID NO: 194802 - DNA, 8 bp, Unknown
  misc_feature (1)..( 8): Result.006 file - promoters50/4911309
cttattat

SEQ ID NO: 194803 - DNA, 8 bp, Unknown
  misc_feature (1)..( 8): Result.006 file - promoters50/4911309
attattat

SEQ ID NO: 194804 - DNA, 8 bp, Unknown
  misc_feature (1)..( 8): Result.006 file - promoters50/4911312
cttcttac

SEQ ID NO: 194805 - DNA, 13 bp, Unknown
  misc_feature (1)..( 13): Result.006 file - promoters50/4911312
tgattacattttg

SEQ ID NO: 194806 - DNA, 13 bp, Unknown
  misc_feature (1)..( 13): Result.006 file - promoters50/4911312
ggatcacaataca

SEQ ID NO: 194807 - DNA, 13 bp, Unknown
  misc_feature (1)..( 13): Result.006 file - promoters50/4911312
attttacagtttg

SEQ ID NO: 194808 - DNA, 13 bp, Unknown
  misc_feature (1)..( 13): Result.006 file - promoters50/4911312
acatcacattcat

SEQ ID NO: 194809 - DNA, 13 bp, Unknown
  misc_feature (1)..( 13): Result.006 file - promoters50/4911312
ggatcacttgcga

SEQ ID NO: 194810 - DNA, 13 bp, Unknown
  misc_feature (1)..( 13): Result.006 file - promoters50/4911314
tttttacacaaat

SEQ ID NO: 194811 - DNA, 7 bp, Unknown
  misc_feature (1)..( 7): Result.006 file - promoters50/4911314
cagttgt

SEQ ID NO: 194812 - DNA, 7 bp, Unknown
  misc_feature (1)..( 7): Result.006 file - promoters50/4911314
gagttgt

SEQ ID NO: 194813 - DNA, 7 bp, Unknown
  misc_feature (1)..( 7): Result.006 file - promoters50/4911314
gagttgt

SEQ ID NO: 194814 - DNA, 7 bp, Unknown
  misc_feature (1)..( 7): Result.006 file - promoters50/4911314
cagttgc

SEQ ID NO: 194815 - DNA, 9 bp, Unknown
  misc_feature (1)..( 9): Result.006 file - promoters50/4911314
ctgttgaca

SEQ ID NO: 194816 - DNA, 9 bp, Unknown
  misc_feature (1)..( 9): Result.006 file - promoters50/4911314
ctgatgaaa

SEQ ID NO: 194817 - DNA, 9 bp, Unknown
  misc_feature (1)..( 9): Result.006 file - promoters50/4911314
gggatcaaa

SEQ ID NO: 194818 - DNA, 9 bp, Unknown
  misc_feature (1)..( 9): Result.006 file - promoters50/4911314
aaaatttaa

SEQ ID NO: 194819 - DNA, 9 bp, Unknown
  misc_feature (1)..( 9): Result.006 file - promoters50/4911314
ttgatttaa

SEQ ID NO: 194820 - DNA, 9 bp, Unknown
  misc_feature (1)..( 9): Result.006 file - promoters50/4911314
ttgttttat

SEQ ID NO: 194821 - DNA, 7 bp, Unknown
  misc_feature (1)..( 7): Result.006 file - promoters50/4911314
ttggaat

SEQ ID NO: 194822 - DNA, 7 bp, Unknown
  misc_feature (1)..( 7): Result.006 file - promoters50/4911314
ttggaaa

SEQ ID NO: 194823 - DNA, 7 bp, Unknown
  misc_feature (1)..( 7): Result.006 file - promoters50/4911314
ttgaaaa

SEQ ID NO: 194824 - DNA, 16 bp, Unknown
  misc_feature (1)..( 16): Result.006 file - promoters50/4911314
ttgtgtaagacacatt

SEQ ID NO: 194825 - DNA, 16 bp, Unknown
  misc_feature (1)..( 16): Result.006 file - promoters50/4911314
aaaaaaaaaacaaatt

SEQ ID NO: 194826 - DNA, 16 bp, Unknown
  misc_feature (1)..( 16): Result.006 file - promoters50/4911344
aaaaaagaaagaaatc

SEQ ID NO: 194827 - DNA, 9 bp, Unknown
  misc_feature (1)..( 9): Result.006 file - promoters50/4911344
ttgttaatg

SEQ ID NO: 194828 - DNA, 9 bp, Unknown
  misc_feature (1)..( 9): Result.006 file - promoters50/4911344
cagtttatg

SEQ ID NO: 194829 - DNA, 9 bp, Unknown
  misc_feature (1)..( 9): Result.006 file - promoters50/4911380
cagtatatc

SEQ ID NO: 194830 - DNA, 11 bp, Unknown
  misc_feature (1)..( 11): Result.006 file - promoters50/4911380
ccttttttctg

SEQ ID NO: 194831 - DNA, 11 bp, Unknown
  misc_feature (1)..( 11): Result.006 file - promoters50/4911380
tctcatttctg

SEQ ID NO: 194832 - DNA, 11 bp, Unknown
  misc_feature (1)..( 11): Result.006 file - promoters50/4911380
gaaaatttcta

SEQ ID NO: 194833 - DNA, 11 bp, Unknown
  misc_feature (1)..( 11): Result.006 file - promoters50/4911380
aaaaaattcca

SEQ ID NO: 194834 - DNA, 11 bp, Unknown
  misc_feature (1)..( 11): Result.006 file - promoters50/4911380
aaaaaatagcc

SEQ ID NO: 194835 - DNA, 11 bp, Unknown
  misc_feature (1)..( 11): Result.006 file - promoters50/4911380
tgaaactagat

SEQ ID NO: 194836 - DNA, 12 bp, Unknown
  misc_feature (1)..( 12): Result.006 file - promoters50/4911380
ctatctatcaac

SEQ ID NO: 194837 - DNA, 12 bp, Unknown
  misc_feature (1)..( 12): Result.006 file - promoters50/4911380
taatctaacaac

SEQ ID NO: 194838 - DNA, 12 bp, Unknown
  misc_feature (1)..( 12): Result.006 file - promoters50/4911380
atatatatgttt

SEQ ID NO: 194839 - DNA, 12 bp, Unknown
  misc_feature (1)..( 12): Result.006 file - promoters50/4911380
ttatatagcaaa

SEQ ID NO: 194840 - DNA, 12 bp, Unknown
  misc_feature (1)..( 12): Result.006 file - promoters50/4911380
agaaataacaaa

SEQ ID NO: 194841 - DNA, 12 bp, Unknown
  misc_feature (1)..( 12): Result.006 file - promoters50/4911457
atatatatagtt

SEQ ID NO: 194842 - DNA, 13 bp, Unknown
  misc_feature (1)..( 13): Result.006 file - promoters50/4911457
ctttagtctttta

SEQ ID NO: 194843 - DNA, 13 bp, Unknown
  misc_feature (1)..( 13): Result.006 file - promoters50/4911457
cttgagtcgttta

SEQ ID NO: 194844 - DNA, 13 bp, Unknown
  misc_feature (1)..( 13): Result.006 file - promoters50/4911457
aaagagtcgtttg

SEQ ID NO: 194845 - DNA, 13 bp, Unknown
  misc_feature (1)..( 13): Result.006 file - promoters50/4911457
tttgagtccctgg

SEQ ID NO: 194846 - DNA, 10 bp, Unknown
  misc_feature (1)..( 10): Result.006 file - promoters50/4911457
ctttgcagac

SEQ ID NO: 194847 - DNA, 10 bp, Unknown
  misc_feature (1)..( 10): Result.006 file - promoters50/4911457
tgttggagaa

SEQ ID NO: 194848 - DNA, 10 bp, Unknown
  misc_feature (1)..( 10): Result.006 file - promoters50/4911457
tgttggattt

SEQ ID NO: 194849 - DNA, 10 bp, Unknown
  misc_feature (1)..( 10): Result.006 file - promoters50/4911457
ggttgaattt

SEQ ID NO: 194850 - DNA, 11 bp, Unknown
  misc_feature (1)..( 11): Result.006 file - promoters50/4911457
taatattaaaa

SEQ ID NO: 194851 - DNA, 11 bp, Unknown
  misc_feature (1)..( 11): Result.006 file - promoters50/4911457
caattttagat

SEQ ID NO: 194852 - DNA, 11 bp, Unknown
  misc_feature (1)..( 11): Result.006 file - promoters50/4911457
gaatttgagat

SEQ ID NO: 194853 - DNA, 11 bp, Unknown
  misc_feature (1)..( 11): Result.006 file - promoters50/4911485
gaatttggata

SEQ ID NO: 194854 - DNA, 8 bp, Unknown
  misc_feature (1)..( 8): Result.006 file - promoters50/4911485
ctttttac

SEQ ID NO: 194855 - DNA, 8 bp, Unknown
  misc_feature (1)..( 8): Result.006 file - promoters50/4911485
gtttttat

SEQ ID NO: 194856 - DNA, 8 bp, Unknown
  misc_feature (1)..( 8): Result.006 file - promoters50/4911485
atttttac

SEQ ID NO: 194857 - DNA, 8 bp, Unknown
  misc_feature (1)..( 8): Result.006 file - promoters50/4911485
gttgttac

SEQ ID NO: 194858 - DNA, 8 bp, Unknown
  misc_feature (1)..( 8): Result.006 file - promoters50/4911485
attggtgt

SEQ ID NO: 194859 - DNA, 8 bp, Unknown
  misc_feature (1)..( 8): Result.006 file - promoters50/4911485
attattat

SEQ ID NO: 194860 - DNA, 12 bp, Unknown
  misc_feature (1)..( 12): Result.006 file - promoters50/4911485
agagttggatag

SEQ ID NO: 194861 - DNA, 12 bp, Unknown
  misc_feature (1)..( 12): Result.006 file - promoters50/4911485
ttgagtggatat

SEQ ID NO: 194862 - DNA, 12 bp, Unknown
  misc_feature (1)..( 12): Result.006 file - promoters50/4911485
ttacttgcataa

SEQ ID NO: 194863 - DNA, 12 bp, Unknown
  misc_feature (1)..( 12): Result.006 file - promoters50/4911485
gatgtttgatta

SEQ ID NO: 194864 - DNA, 12 bp, Unknown
  misc_feature (1)..( 12): Result.006 file - promoters50/4911485
ttctttggatta

SEQ ID NO: 194865 - DNA, 12 bp, Unknown
  misc_feature (1)..( 12): Result.006 file - promoters50/4911485
atgcttgcttaa

SEQ ID NO: 194866 - DNA, 12 bp, Unknown
  misc_feature (1)..( 12): Result.006 file - promoters50/4911485
gggtttcgataa

SEQ ID NO: 194867 - DNA, 10 bp, Unknown
  misc_feature (1)..( 10): Result.006 file - promoters50/4911485
ttatcaatgg

SEQ ID NO: 194868 - DNA, 10 bp, Unknown
  misc_feature (1)..( 10): Result.006 file - promoters50/4911485
gtataaatat

SEQ ID NO: 194869 - DNA, 10 bp, Unknown
  misc_feature (1)..( 10): Result.006 file - promoters50/4911485
ttaacaaaac

SEQ ID NO: 194870 - DNA, 10 bp, Unknown
  misc_feature (1)..( 10): Result.006 file - promoters50/4911485
tcatccatga

SEQ ID NO: 194871 - DNA, 10 bp, Unknown
  misc_feature (1)..( 10): Result.006 file - promoters50/4911485
caaacgaaac

SEQ ID NO: 194872 - DNA, 10 bp, Unknown
  misc_feature (1)..( 10): Result.006 file - promoters50/4911485
acataaattt

SEQ ID NO: 194873 - DNA, 14 bp, Unknown
  misc_feature (1)..( 14): Result.006 file - promoters50/4911485
tttgtaaattttgc

SEQ ID NO: 194874 - DNA, 14 bp, Unknown
  misc_feature (1)..( 14): Result.006 file - promoters50/4911485
tgagtatattttat

SEQ ID NO: 194875 - DNA, 14 bp, Unknown
  misc_feature (1)..( 14): Result.006 file - promoters50/4911485
gacataaatttttt

SEQ ID NO: 194876 - DNA, 14 bp, Unknown
  misc_feature (1)..( 14): Result.006 file - promoters50/4911485
gatgtaaaaattat

SEQ ID NO: 194877 - DNA, 14 bp, Unknown
  misc_feature (1)..( 14): Result.006 file - promoters50/4911485
ggcttcgattgttt

SEQ ID NO: 194878 - DNA, 14 bp, Unknown
  misc_feature (1)..( 14): Result.006 file - promoters50/4911485
tgattatatgtaca

SEQ ID NO: 194879 - DNA, 11 bp, Unknown
  misc_feature (1)..( 11): Result.006 file - promoters50/4911485
tgtataatttt

SEQ ID NO: 194880 - DNA, 11 bp, Unknown
  misc_feature (1)..( 11): Result.006 file - promoters50/4911485
ccaataattta

SEQ ID NO: 194881 - DNA, 11 bp, Unknown
  misc_feature (1)..( 11): Result.006 file - promoters50/4911485
ataaaaatttt

SEQ ID NO: 194882 - DNA, 11 bp, Unknown
  misc_feature (1)..( 11): Result.006 file - promoters50/4911485
taaatcatttt

SEQ ID NO: 194883 - DNA, 11 bp, Unknown
  misc_feature (1)..( 11): Result.006 file - promoters50/4911485
ttgaaaattta

SEQ ID NO: 194884 - DNA, 11 bp, Unknown
  misc_feature (1)..( 11): Result.006 file - promoters50/4911485
ataaaagtttg

SEQ ID NO: 194885 - DNA, 15 bp, Unknown
  misc_feature (1)..( 15): Result.006 file - promoters50/4911485
tatatgcttgcttaa

SEQ ID NO: 194886 - DNA, 15 bp, Unknown
  misc_feature (1)..( 15): Result.006 file - promoters50/4911485
ccactgcttgttggt

SEQ ID NO: 194887 - DNA, 15 bp, Unknown
  misc_feature (1)..( 15): Result.006 file - promoters50/4911485
ctgatgtttgattaa

SEQ ID NO: 194888 - DNA, 15 bp, Unknown
  misc_feature (1)..( 15): Result.006 file - promoters50/4911485
ttaatgtttgagtgg

SEQ ID NO: 194889 - DNA, 15 bp, Unknown
  misc_feature (1)..( 15): Result.006 file - promoters50/4911485
ttaatgtttgcttct

SEQ ID NO: 194890 - DNA, 15 bp, Unknown
  misc_feature (1)..( 15): Result.006 file - promoters50/4911485
ttgatgtgtgatttc

SEQ ID NO: 194891 - DNA, 15 bp, Unknown
  misc_feature (1)..( 15): Result.006 file - promoters50/4911485
agtttgtttgttact

SEQ ID NO: 194892 - DNA, 12 bp, Unknown
  misc_feature (1)..( 12): Result.006 file - promoters50/4911485
atgattgtgaac

SEQ ID NO: 194893 - DNA, 12 bp, Unknown
  misc_feature (1)..( 12): Result.006 file - promoters50/4911485
atgtttgagtgg

SEQ ID NO: 194894 - DNA, 12 bp, Unknown
  misc_feature (1)..( 12): Result.006 file - promoters50/4911485
gtttttgctgat

SEQ ID NO: 194895 - DNA, 12 bp, Unknown
  misc_feature (1)..( 12): Result.006 file - promoters50/4911485
atgtttgcttct

SEQ ID NO: 194896 - DNA, 12 bp, Unknown
  misc_feature (1)..( 12): Result.006 file - promoters50/4911485
ttgtttgttact

SEQ ID NO: 194897 - DNA, 12 bp, Unknown
  misc_feature (1)..( 12): Result.006 file - promoters50/4911485
atgtgtgatttc

SEQ ID NO: 194898 - DNA, 10 bp, Unknown
  misc_feature (1)..( 10): Result.006 file - promoters50/4911485
gagttcataa

SEQ ID NO: 194899 - DNA, 10 bp, Unknown
  misc_feature (1)..( 10): Result.006 file - promoters50/4911485
ttgtttatat

SEQ ID NO: 194900 - DNA, 10 bp, Unknown
  misc_feature (1)..( 10): Result.006 file - promoters50/4911485
atgtttaatc

SEQ ID NO: 194901 - DNA, 10 bp, Unknown
  misc_feature (1)..( 10): Result.006 file - promoters50/4911485
ttgattaaaa

SEQ ID NO: 194902 - DNA, 10 bp, Unknown
  misc_feature (1)..( 10): Result.006 file - promoters50/4911485
acttttatta

SEQ ID NO: 194903 - DNA, 10 bp, Unknown
  misc_feature (1)..( 10): Result.006 file - promoters50/4911492
cattttatgt

SEQ ID NO: 194904 - DNA, 15 bp, Unknown
  misc_feature (1)..( 15): Result.006 file - promoters50/4911492
tatttttatgtataa

SEQ ID NO: 194905 - DNA, 15 bp, Unknown
  misc_feature (1)..( 15): Result.006 file - promoters50/4911492
tttttgtatccatca

SEQ ID NO: 194906 - DNA, 15 bp, Unknown
  misc_feature (1)..( 15): Result.006 file - promoters50/4911492
tattcttaattgtat

SEQ ID NO: 194907 - DNA, 15 bp, Unknown
  misc_feature (1)..( 15): Result.006 file - promoters50/4911492
caattttatgcaagg

SEQ ID NO: 194908 - DNA, 15 bp, Unknown
  misc_feature (1)..( 15): Result.006 file - promoters50/4911492
caaatttattgttgt

SEQ ID NO: 194909 - DNA, 15 bp, Unknown
  misc_feature (1)..( 15): Result.006 file - promoters50/4911492
taggtttaaatttta

SEQ ID NO: 194910 - DNA, 16 bp, Unknown
  misc_feature (1)..( 16): Result.006 file - promoters50/4911492
tttttatgtataatgg

SEQ ID NO: 194911 - DNA, 16 bp, Unknown
  misc_feature (1)..( 16): Result.006 file - promoters50/4911492
tttatatctataataa

SEQ ID NO: 194912 - DNA, 16 bp, Unknown
  misc_feature (1)..( 16): Result.006 file - promoters50/4911492
cttctatgtatttaat

SEQ ID NO: 194913 - DNA, 16 bp, Unknown
  misc_feature (1)..( 16): Result.006 file - promoters50/4911492
aaaatatgcatagctt

SEQ ID NO: 194914 - DNA, 16 bp, Unknown
  misc_feature (1)..( 16): Result.006 file - promoters50/4911492
ataaatcgtaaaattt

SEQ ID NO: 194915 - DNA, 16 bp, Unknown
  misc_feature (1)..( 16): Result.006 file - promoters50/4911492
aaacactggaaacttt

SEQ ID NO: 194916 - DNA, 16 bp, Unknown
  misc_feature (1)..( 16): Result.006 file - promoters50/4911492
aaccaaaataaaataa

SEQ ID NO: 194917 - DNA, 16 bp, Unknown
  misc_feature (1)..( 16): Result.006 file - promoters50/4911492
agagcccatatttctc

SEQ ID NO: 194918 - DNA, 11 bp, Unknown
  misc_feature (1)..( 11): Result.006 file - promoters50/4911492
gttttatttca

SEQ ID NO: 194919 - DNA, 11 bp, Unknown
  misc_feature (1)..( 11): Result.006 file - promoters50/4911492
tttttatttca

SEQ ID NO: 194920 - DNA, 11 bp, Unknown
  misc_feature (1)..( 11): Result.006 file - promoters50/4911492
gttttatttat

SEQ ID NO: 194921 - DNA, 11 bp, Unknown
  misc_feature (1)..( 11): Result.006 file - promoters50/4911492
ctttaattttg

SEQ ID NO: 194922 - DNA, 11 bp, Unknown
  misc_feature (1)..( 11): Result.006 file - promoters50/4911492
tttttacggcg

SEQ ID NO: 194923 - DNA, 11 bp, Unknown
  misc_feature (1)..( 11): Result.006 file - promoters50/4911492
aaattattttc

SEQ ID NO: 194924 - DNA, 14 bp, Unknown
  misc_feature (1)..( 14): Result.006 file - promoters50/4911492
atgtataatggaaa

SEQ ID NO: 194925 - DNA, 14 bp, Unknown
  misc_feature (1)..( 14): Result.006 file - promoters50/4911492
ttgtataattttgt

SEQ ID NO: 194926 - DNA, 14 bp, Unknown
  misc_feature (1)..( 14): Result.006 file - promoters50/4911492
ttgtatccatcaac

SEQ ID NO: 194927 - DNA, 14 bp, Unknown
  misc_feature (1)..( 14): Result.006 file - promoters50/4911492
gtcgatagtttaac

SEQ ID NO: 194928 - DNA, 14 bp, Unknown
  misc_feature (1)..( 14): Result.006 file - promoters50/4911492
ttcaatattttaac

SEQ ID NO: 194929 - DNA, 14 bp, Unknown
  misc_feature (1)..( 14): Result.006 file - promoters50/4911492
gtttaaattttaat

SEQ ID NO: 194930 - DNA, 14 bp, Unknown
  misc_feature (1)..( 14): Result.006 file - promoters50/4911492
gattaaatatgtta

SEQ ID NO: 194931 - DNA, 10 bp, Unknown
  misc_feature (1)..( 10): Result.006 file - promoters50/4911492
tccaactgtg

SEQ ID NO: 194932 - DNA, 10 bp, Unknown
  misc_feature (1)..( 10): Result.006 file - promoters50/4911492
ttcaattgta

SEQ ID NO: 194933 - DNA, 10 bp, Unknown
  misc_feature (1)..( 10): Result.006 file - promoters50/4911492
ttcaatttaa

SEQ ID NO: 194934 - DNA, 10 bp, Unknown
  misc_feature (1)..( 10): Result.006 file - promoters50/4911492
cacaatttac

SEQ ID NO: 194935 - DNA, 10 bp, Unknown
  misc_feature (1)..( 10): Result.006 file - promoters50/4911492
aataatagta

SEQ ID NO: 194936 - DNA, 10 bp, Unknown
  misc_feature (1)..( 10): Result.006 file - promoters50/4911492
cttaattgta

SEQ ID NO: 194937 - DNA, 10 bp, Unknown
  misc_feature (1)..( 10): Result.006 file - promoters50/4911492
gttatttgag

SEQ ID NO: 194938 - DNA, 13 bp, Unknown
  misc_feature (1)..( 13): Result.006 file - promoters50/4911492
aaaaataaactaa

SEQ ID NO: 194939 - DNA, 13 bp, Unknown
  misc_feature (1)..( 13): Result.006 file - promoters50/4911492
caaaataaaataa

SEQ ID NO: 194940 - DNA, 13 bp, Unknown
  misc_feature (1)..( 13): Result.006 file - promoters50/4911492
ataaccaaaaata

SEQ ID NO: 194941 - DNA, 13 bp, Unknown
  misc_feature (1)..( 13): Result.006 file - promoters50/4911492
taaagtaatttaa

SEQ ID NO: 194942 - DNA, 13 bp, Unknown
  misc_feature (1)..( 13): Result.006 file - promoters50/4911492
acaaataaatcgt

SEQ ID NO: 194943 - DNA, 13 bp, Unknown
  misc_feature (1)..( 13): Result.006 file - promoters50/4911582
caagataaataaa

SEQ ID NO: 194944 - DNA, 7 bp, Unknown
  misc_feature (1)..( 7): Result.006 file - promoters50/4911582
tttcctt

SEQ ID NO: 194945 - DNA, 7 bp, Unknown
  misc_feature (1)..( 7): Result.006 file - promoters50/4911582
ttttctt

SEQ ID NO: 194946 - DNA, 7 bp, Unknown
  misc_feature (1)..( 7): Result.006 file - promoters50/4911598
ttttctt

SEQ ID NO: 194947 - DNA, 8 bp, Unknown
  misc_feature (1)..( 8): Result.006 file - promoters50/4911598
taaaatgt

SEQ ID NO: 194948 - DNA, 8 bp, Unknown
  misc_feature (1)..( 8): Result.006 file - promoters50/4911598
taaaatga

SEQ ID NO: 194949 - DNA, 8 bp, Unknown
  misc_feature (1)..( 8): Result.006 file - promoters50/4911598
aaaaatgt

SEQ ID NO: 194950 - DNA, 9 bp, Unknown
  misc_feature (1)..( 9): Result.006 file - promoters50/4911598
aagtataat

SEQ ID NO: 194951 - DNA, 9 bp, Unknown
  misc_feature (1)..( 9): Result.006 file - promoters50/4911598
aaggataat

SEQ ID NO: 194952 - DNA, 9 bp, Unknown
  misc_feature (1)..( 9): Result.006 file - promoters50/4911598
tagtatagt

SEQ ID NO: 194953 - DNA, 9 bp, Unknown
  misc_feature (1)..( 9): Result.006 file - promoters50/4911598
aagtatttt

SEQ ID NO: 194954 - DNA, 14 bp, Unknown
  misc_feature (1)..( 14): Result.006 file - promoters50/4911598
taaagacatattga

SEQ ID NO: 194955 - DNA, 14 bp, Unknown
  misc_feature (1)..( 14): Result.006 file - promoters50/4911598
tgtacccatactga

SEQ ID NO: 194956 - DNA, 14 bp, Unknown
  misc_feature (1)..( 14): Result.006 file - promoters50/4911598
taaacacatataaa

SEQ ID NO: 194957 - DNA, 13 bp, Unknown
  misc_feature (1)..( 13): Result.006 file - promoters50/4911598
tttcaatctaaaa

SEQ ID NO: 194958 - DNA, 13 bp, Unknown
  misc_feature (1)..( 13): Result.006 file - promoters50/4911598
tctatctctaaaa

SEQ ID NO: 194959 - DNA, 13 bp, Unknown
  misc_feature (1)..( 13): Result.006 file - promoters50/4911598
tatttatctttaa

SEQ ID NO: 194960 - DNA, 14 bp, Unknown
  misc_feature (1)..( 14): Result.006 file - promoters50/4911598
taatcaaaaatatt

SEQ ID NO: 194961 - DNA, 14 bp, Unknown
  misc_feature (1)..( 14): Result.006 file - promoters50/4911598
cttacaaaattatt

SEQ ID NO: 194962 - DNA, 14 bp, Unknown
  misc_feature (1)..( 14): Result.006 file - promoters50/4911598
gtgataaacatatt

SEQ ID NO: 194963 - DNA, 14 bp, Unknown
  misc_feature (1)..( 14): Result.006 file - promoters50/4911598
cttccaagatttcc

SEQ ID NO: 194964 - DNA, 9 bp, Unknown
  misc_feature (1)..( 9): Result.006 file - promoters50/4911598
aatgtgtct

SEQ ID NO: 194965 - DNA, 9 bp, Unknown
  misc_feature (1)..( 9): Result.006 file - promoters50/4911598
aatgtgata

SEQ ID NO: 194966 - DNA, 9 bp, Unknown
  misc_feature (1)..( 9): Result.006 file - promoters50/4911598
catgtgtct

SEQ ID NO: 194967 - DNA, 7 bp, Unknown
  misc_feature (1)..( 7): Result.006 file - promoters50/4911598
aatttta

SEQ ID NO: 194968 - DNA, 7 bp, Unknown
  misc_feature (1)..( 7): Result.006 file - promoters50/4911598
aattttt

SEQ ID NO: 194969 - DNA, 7 bp, Unknown
  misc_feature (1)..( 7): Result.006 file - promoters50/4911598
aatatta

SEQ ID NO: 194970 - DNA, 11 bp, Unknown
  misc_feature (1)..( 11): Result.006 file - promoters50/4911598
aataatttcta

SEQ ID NO: 194971 - DNA, 11 bp, Unknown
  misc_feature (1)..( 11): Result.006 file - promoters50/4911598
tatattttgaa

SEQ ID NO: 194972 - DNA, 11 bp, Unknown
  misc_feature (1)..( 11): Result.006 file - promoters50/4911598
tatattccttg

SEQ ID NO: 194973 - DNA, 11 bp, Unknown
  misc_feature (1)..( 11): Result.006 file - promoters50/4911598
taaattttgaa

SEQ ID NO: 194974 - DNA, 11 bp, Unknown
  misc_feature (1)..( 11): Result.006 file - promoters50/4911598
gaagaaatcta

SEQ ID NO: 194975 - DNA, 11 bp, Unknown
  misc_feature (1)..( 11): Result.006 file - promoters50/4911598
gaaaaaaacta

SEQ ID NO: 194976 - DNA, 11 bp, Unknown
  misc_feature (1)..( 11): Result.006 file - promoters50/4911598
aaagaaaaatg

SEQ ID NO: 194977 - DNA, 9 bp, Unknown
  misc_feature (1)..( 9): Result.006 file - promoters50/4911598
ggtttttct

SEQ ID NO: 194978 - DNA, 9 bp, Unknown
  misc_feature (1)..( 9): Result.006 file - promoters50/4911598
tatttttct

SEQ ID NO: 194979 - DNA, 9 bp, Unknown
  misc_feature (1)..( 9): Result.006 file - promoters50/4911946
tatttttta

SEQ ID NO: 194980 - DNA, 8 bp, Unknown
  misc_feature (1)..( 8): Result.006 file - promoters50/4911946
tgaagaaa

SEQ ID NO: 194981 - DNA, 8 bp, Unknown
  misc_feature (1)..( 8): Result.006 file - promoters50/4911946
cgaaaaaa

SEQ ID NO: 194982 - DNA, 8 bp, Unknown
  misc_feature (1)..( 8): Result.006 file - promoters50/4911946
tgaagagg

SEQ ID NO: 194983 - DNA, 8 bp, Unknown
  misc_feature (1)..( 8): Result.006 file - promoters50/4911946
tcaaaaaa

SEQ ID NO: 194984 - DNA, 7 bp, Unknown
  misc_feature (1)..( 7): Result.006 file - promoters50/4911946
aatggtt

SEQ ID NO: 194985 - DNA, 7 bp, Unknown
  misc_feature (1)..( 7): Result.006 file - promoters50/4911946
aattgtt

SEQ ID NO: 194986 - DNA, 7 bp, Unknown
  misc_feature (1)..( 7): Result.006 file - promoters50/4911946
cattgtt

SEQ ID NO: 194987 - DNA, 9 bp, Unknown
  misc_feature (1)..( 9): Result.006 file - promoters50/4911946
ttgaattca

SEQ ID NO: 194988 - DNA, 9 bp, Unknown
  misc_feature (1)..( 9): Result.006 file - promoters50/4911946
ttgatttca

SEQ ID NO: 194989 - DNA, 9 bp, Unknown
  misc_feature (1)..( 9): Result.006 file - promoters50/4911950
gtgaattca

SEQ ID NO: 194990 - DNA, 10 bp, Unknown
  misc_feature (1)..( 10): Result.006 file - promoters50/4911950
caaaatggta

SEQ ID NO: 194991 - DNA, 10 bp, Unknown
  misc_feature (1)..( 10): Result.006 file - promoters50/4911950
aaaaatcgta

SEQ ID NO: 194992 - DNA, 10 bp, Unknown
  misc_feature (1)..( 10): Result.006 file - promoters50/4911994
caaaatctgg

SEQ ID NO: 194993 - DNA, 9 bp, Unknown
  misc_feature (1)..( 9): Result.006 file - promoters50/4911994
tttttttgt

SEQ ID NO: 194994 - DNA, 9 bp, Unknown
  misc_feature (1)..( 9): Result.006 file - promoters50/4911994
ctttgttgt

SEQ ID NO: 194995 - DNA, 10 bp, Unknown
  misc_feature (1)..( 10): Result.006 file - promoters50/4912060
cttcttttag

SEQ ID NO: 194996 - DNA, 8 bp, Unknown
  misc_feature (1)..( 8): Result.006 file - promoters50/4912060
taattttt

SEQ ID NO: 194997 - DNA, 8 bp, Unknown
  misc_feature (1)..( 8): Result.006 file - promoters50/4912060
taagtttg

SEQ ID NO: 194998 - DNA, 8 bp, Unknown
  misc_feature (1)..( 8): Result.006 file - promoters50/4912060
ggattttt

SEQ ID NO: 194999 - DNA, 7 bp, Unknown
  misc_feature (1)..( 7): Result.006 file - promoters50/4912060
tttgttt

SEQ ID NO: 195000 - DNA, 7 bp, Unknown
  misc_feature (1)..( 7): Result.006 file - promoters50/4912060
ttttttt

SEQ ID NO: 195001 - DNA, 7 bp, Unknown
  misc_feature (1)..( 7): Result.006 file - promoters50/4912130
attgttt

SEQ ID NO: 195002 - DNA, 11 bp, Unknown
  misc_feature (1)..( 11): Result.006 file - promoters50/4912130
tatatttttaa

SEQ ID NO: 195003 - DNA, 11 bp, Unknown
  misc_feature (1)..( 11): Result.006 file - promoters50/4912130
ttaatttttac

SEQ ID NO: 195004 - DNA, 11 bp, Unknown
  misc_feature (1)..( 11): Result.006 file - promoters50/4912130
tatagttttaa

SEQ ID NO: 195005 - DNA, 10 bp, Unknown
  misc_feature (1)..( 10): Result.006 file - promoters50/4912130
agtatataaa

SEQ ID NO: 195006 - DNA, 10 bp, Unknown
  misc_feature (1)..( 10): Result.006 file - promoters50/4912130
agtgtataaa

SEQ ID NO: 195007 - DNA, 10 bp, Unknown
  misc_feature (1)..( 10): Result.006 file - promoters50/4912130
gccgtacaaa

SEQ ID NO: 195008 - DNA, 9 bp, Unknown
  misc_feature (1)..( 9): Result.006 file - promoters50/4912130
aaaccgaat

SEQ ID NO: 195009 - DNA, 9 bp, Unknown
  misc_feature (1)..( 9): Result.006 file - promoters50/4912130
ttaccaaat

SEQ ID NO: 195010 - DNA, 9 bp, Unknown
  misc_feature (1)..( 9): Result.006 file - promoters50/4912137
ttaacaaaa

SEQ ID NO: 195011 - DNA, 17 bp, Unknown
  misc_feature (1)..( 17): Result.006 file - promoters50/4912137
gtttagagtctataaac

SEQ ID NO: 195012 - DNA, 17 bp, Unknown
  misc_feature (1)..( 17): Result.006 file - promoters50/4912137
tgatcaaatttattaac

SEQ ID NO: 195013 - DNA, 17 bp, Unknown
  misc_feature (1)..( 17): Result.006 file - promoters50/4912137
tgatgaaaattagtaat

SEQ ID NO: 195014 - DNA, 9 bp, Unknown
  misc_feature (1)..( 9): Result.006 file - promoters50/4912137
attatatta

SEQ ID NO: 195015 - DNA, 9 bp, Unknown
  misc_feature (1)..( 9): Result.006 file - promoters50/4912137
attatataa

SEQ ID NO: 195016 - DNA, 9 bp, Unknown
  misc_feature (1)..( 9): Result.006 file - promoters50/4912137
tctatgtaa

SEQ ID NO: 195017 - DNA, 7 bp, Unknown
  misc_feature (1)..( 7): Result.006 file - promoters50/4912137
aaaatac

SEQ ID NO: 195018 - DNA, 7 bp, Unknown
  misc_feature (1)..( 7): Result.006 file - promoters50/4912137
aaaataa

SEQ ID NO: 195019 - DNA, 7 bp, Unknown
  misc_feature (1)..( 7): Result.006 file - promoters50/4912176
caaataa

SEQ ID NO: 195020 - DNA, 9 bp, Unknown
  misc_feature (1)..( 9): Result.006 file - promoters50/4912176
tatatttga

SEQ ID NO: 195021 - DNA, 9 bp, Unknown
  misc_feature (1)..( 9): Result.006 file - promoters50/4912176
tatgttttt

SEQ ID NO: 195022 - DNA, 9 bp, Unknown
  misc_feature (1)..( 9): Result.006 file - promoters50/4912240
tatatttga

SEQ ID NO: 195023 - DNA, 9 bp, Unknown
  misc_feature (1)..( 9): Result.006 file - promoters50/4912240
ggggaatta

SEQ ID NO: 195024 - DNA, 9 bp, Unknown
  misc_feature (1)..( 9): Result.006 file - promoters50/4912240
ttggattta

SEQ ID NO: 195025 - DNA, 9 bp, Unknown
  misc_feature (1)..( 9): Result.006 file - promoters50/4912240
ttggttttg

SEQ ID NO: 195026 - DNA, 9 bp, Unknown
  misc_feature (1)..( 9): Result.006 file - promoters50/4912240
gtggattta

SEQ ID NO: 195027 - DNA, 8 bp, Unknown
  misc_feature (1)..( 8): Result.006 file - promoters50/4912240
caaaacac

SEQ ID NO: 195028 - DNA, 8 bp, Unknown
  misc_feature (1)..( 8): Result.006 file - promoters50/4912240
caaaacct

SEQ ID NO: 195029 - DNA, 8 bp, Unknown
  misc_feature (1)..( 8): Result.006 file - promoters50/4912240
gaaagcac

SEQ ID NO: 195030 - DNA, 8 bp, Unknown
  misc_feature (1)..( 8): Result.006 file - promoters50/4912240
aaaaacat

SEQ ID NO: 195031 - DNA, 16 bp, Unknown
  misc_feature (1)..( 16): Result.006 file - promoters50/4912240
agcttgaatcaatatt

SEQ ID NO: 195032 - DNA, 16 bp, Unknown
  misc_feature (1)..( 16): Result.006 file - promoters50/4912240
taattgattcaaaatt

SEQ ID NO: 195033 - DNA, 16 bp, Unknown
  misc_feature (1)..( 16): Result.006 file - promoters50/4912240
taagtgatggtgagag

SEQ ID NO: 195034 - DNA, 16 bp, Unknown
  misc_feature (1)..( 16): Result.006 file - promoters50/4912541
taagtgacacgttcta

SEQ ID NO: 195035 - DNA, 7 bp, Unknown
  misc_feature (1)..( 7): Result.006 file - promoters50/4912541
gtttaaa

SEQ ID NO: 195036 - DNA, 7 bp, Unknown
  misc_feature (1)..( 7): Result.006 file - promoters50/4912541
gtttaag

SEQ ID NO: 195037 - DNA, 8 bp, Unknown
  misc_feature (1)..( 8): Result.006 file - promoters50/4912541
ctttcaat

SEQ ID NO: 195038 - DNA, 10 bp, Unknown
  misc_feature (1)..( 10): Result.006 file - promoters50/4912541
ttgttcaaat

SEQ ID NO: 195039 - DNA, 10 bp, Unknown
  misc_feature (1)..( 10): Result.006 file - promoters50/4912541
tgattctaat

SEQ ID NO: 195040 - DNA, 10 bp, Unknown
  misc_feature (1)..( 10): Result.006 file - promoters50/4912541
agattctaga

SEQ ID NO: 195041 - DNA, 10 bp, Unknown
  misc_feature (1)..( 10): Result.006 file - promoters50/4912541
agaatcttta

SEQ ID NO: 195042 - DNA, 10 bp, Unknown
  misc_feature (1)..( 10): Result.006 file - promoters50/4912541
tagtgagagc

SEQ ID NO: 195043 - DNA, 10 bp, Unknown
  misc_feature (1)..( 10): Result.006 file - promoters50/4912541
tagggagaga

SEQ ID NO: 195044 - DNA, 10 bp, Unknown
  misc_feature (1)..( 10): Result.006 file - promoters50/4913011
gatggagaga

SEQ ID NO: 195045 - DNA, 8 bp, Unknown
  misc_feature (1)..( 8): Result.006 file - promoters50/4913011
agaattaa

SEQ ID NO: 195046 - DNA, 8 bp, Unknown
  misc_feature (1)..( 8): Result.006 file - promoters50/4913011
ctaattaa

SEQ ID NO: 195047 - DNA, 8 bp, Unknown
  misc_feature (1)..( 8): Result.006 file - promoters50/4913068
ctaaataa

SEQ ID NO: 195048 - DNA, 12 bp, Unknown
  misc_feature (1)..( 12): Result.006 file - promoters50/4913068
acgtaaacttta

SEQ ID NO: 195049 - DNA, 12 bp, Unknown
  misc_feature (1)..( 12): Result.006 file - promoters50/4913068
ttttaaaattta

SEQ ID NO: 195050 - DNA, 12 bp, Unknown
  misc_feature (1)..( 12): Result.006 file - promoters50/4913068
tgtaaaaatttg

SEQ ID NO: 195051 - DNA, 12 bp, Unknown
  misc_feature (1)..( 12): Result.006 file - promoters50/4913068
aaataaactagt

SEQ ID NO: 195052 - DNA, 12 bp, Unknown
  misc_feature (1)..( 12): Result.006 file - promoters50/4913068
atgtaaaaatta

SEQ ID NO: 195053 - DNA, 12 bp, Unknown
  misc_feature (1)..( 12): Result.006 file - promoters50/4913068
tttcaaaaatac

SEQ ID NO: 195054 - DNA, 11 bp, Unknown
  misc_feature (1)..( 11): Result.006 file - promoters50/4913068
aattgttttcg

SEQ ID NO: 195055 - DNA, 11 bp, Unknown
  misc_feature (1)..( 11): Result.006 file - promoters50/4913068
gattattttgg

SEQ ID NO: 195056 - DNA, 11 bp, Unknown
  misc_feature (1)..( 11): Result.006 file - promoters50/4913068
tattatttcaa

SEQ ID NO: 195057 - DNA, 11 bp, Unknown
  misc_feature (1)..( 11): Result.006 file - promoters50/4913068
gatgattttgg

SEQ ID NO: 195058 - DNA, 11 bp, Unknown
  misc_feature (1)..( 11): Result.006 file - promoters50/4913068
tattatcaatg

SEQ ID NO: 195059 - DNA, 16 bp, Unknown
  misc_feature (1)..( 16): Result.006 file - promoters50/4913068
acaaattaaatttaaa

SEQ ID NO: 195060 - DNA, 16 bp, Unknown
  misc_feature (1)..( 16): Result.006 file - promoters50/4913068
aattatttaatctaga

SEQ ID NO: 195061 - DNA, 16 bp, Unknown
  misc_feature (1)..( 16): Result.006 file - promoters50/4913068
acaaagtaaagtgaag

SEQ ID NO: 195062 - DNA, 16 bp, Unknown
  misc_feature (1)..( 16): Result.006 file - promoters50/4913068
tctaatgaaatttttc

SEQ ID NO: 195063 - DNA, 16 bp, Unknown
  misc_feature (1)..( 16): Result.006 file - promoters50/4913068
cgtaagaaaaaaaaaa

SEQ ID NO: 195064 - DNA, 20 bp, Unknown
  misc_feature (1)..( 20): Result.006 file - promoters50/4913068
aataaaatagtaatcaaaat

SEQ ID NO: 195065 - DNA, 20 bp, Unknown
  misc_feature (1)..( 20): Result.006 file - promoters50/4913068
aaaaaaattgtaatcctttt

SEQ ID NO: 195066 - DNA, 20 bp, Unknown
  misc_feature (1)..( 20): Result.006 file - promoters50/4913068
aataaactagtaacttaaat

SEQ ID NO: 195067 - DNA, 20 bp, Unknown
  misc_feature (1)..( 20): Result.006 file - promoters50/4913068
gctaacaacttaattctttt

SEQ ID NO: 195068 - DNA, 20 bp, Unknown
  misc_feature (1)..( 20): Result.006 file - promoters50/4913068
aaagatgcattaatttgttt

SEQ ID NO: 195069 - DNA, 17 bp, Unknown
  misc_feature (1)..( 17): Result.006 file - promoters50/4913068
tcgtataaaaaaaattt

SEQ ID NO: 195070 - DNA, 17 bp, Unknown
  misc_feature (1)..( 17): Result.006 file - promoters50/4913068
ttatatataaaaatttt

SEQ ID NO: 195071 - DNA, 17 bp, Unknown
  misc_feature (1)..( 17): Result.006 file - promoters50/4913068
ttgtataattttatata

SEQ ID NO: 195072 - DNA, 17 bp, Unknown
  misc_feature (1)..( 17): Result.006 file - promoters50/4913068
ttggatattttcagtta

SEQ ID NO: 195073 - DNA, 17 bp, Unknown
  misc_feature (1)..( 17): Result.006 file - promoters50/4913724
tttcataaaaaaaaagt

SEQ ID NO: 195074 - DNA, 13 bp, Unknown
  misc_feature (1)..( 13): Result.006 file - promoters50/4913724
aacattttggttt

SEQ ID NO: 195075 - DNA, 13 bp, Unknown
  misc_feature (1)..( 13): Result.006 file - promoters50/4913724
aacagtttgctgt

SEQ ID NO: 195076 - DNA, 13 bp, Unknown
  misc_feature (1)..( 13): Result.006 file - promoters50/4913724
tttcttttggttt

SEQ ID NO: 195077 - DNA, 13 bp, Unknown
  misc_feature (1)..( 13): Result.006 file - promoters50/4914111
accattttcgatc

SEQ ID NO: 195078 - DNA, 7 bp, Unknown
  misc_feature (1)..( 7): Result.006 file - promoters50/4914111
tgtataa

SEQ ID NO: 195079 - DNA, 7 bp, Unknown
  misc_feature (1)..( 7): Result.006 file - promoters50/4914111
tgtatat

SEQ ID NO: 195080 - DNA, 7 bp, Unknown
  misc_feature (1)..( 7): Result.006 file - promoters50/4914111
tgtttat

SEQ ID NO: 195081 - DNA, 9 bp, Unknown
  misc_feature (1)..( 9): Result.006 file - promoters50/4914111
ttgtttctc

SEQ ID NO: 195082 - DNA, 9 bp, Unknown
  misc_feature (1)..( 9): Result.006 file - promoters50/4914111
ctgtgtctc

SEQ ID NO: 195083 - DNA, 9 bp, Unknown
  misc_feature (1)..( 9): Result.006 file - promoters50/4914111
ctgtgttga

SEQ ID NO: 195084 - DNA, 7 bp, Unknown
  misc_feature (1)..( 7): Result.006 file - promoters50/4914111
aatttcg

SEQ ID NO: 195085 - DNA, 7 bp, Unknown
  misc_feature (1)..( 7): Result.006 file - promoters50/4914111
aatttct

SEQ ID NO: 195086 - DNA, 7 bp, Unknown
  misc_feature (1)..( 7): Result.006 file - promoters50/4914111
aatatct

SEQ ID NO: 195087 - DNA, 8 bp, Unknown
  misc_feature (1)..( 8): Result.006 file - promoters50/4914111
ctgttttc

SEQ ID NO: 195088 - DNA, 8 bp, Unknown
  misc_feature (1)..( 8): Result.006 file - promoters50/4914111
ctgtttat

SEQ ID NO: 195089 - DNA, 8 bp, Unknown
  misc_feature (1)..( 8): Result.006 file - promoters50/4914111
gtgtatat

SEQ ID NO: 195090 - DNA, 7 bp, Unknown
  misc_feature (1)..( 7): Result.006 file - promoters50/4914111
tttcttg

SEQ ID NO: 195091 - DNA, 7 bp, Unknown
  misc_feature (1)..( 7): Result.006 file - promoters50/4914111
tttattg

SEQ ID NO: 195092 - DNA, 7 bp, Unknown
  misc_feature (1)..( 7): Result.006 file - promoters50/4914111
tgtatat

SEQ ID NO: 195093 - DNA, 7 bp, Unknown
  misc_feature (1)..( 7): Result.006 file - promoters50/4914111
tatgcag

SEQ ID NO: 195094 - DNA, 7 bp, Unknown
  misc_feature (1)..( 7): Result.006 file - promoters50/4914111
gatgcag

SEQ ID NO: 195095 - DNA, 7 bp, Unknown
  misc_feature (1)..( 7): Result.006 file - promoters50/4914111
gatgcac

SEQ ID NO: 195096 - DNA, 9 bp, Unknown
  misc_feature (1)..( 9): Result.006 file - promoters50/4914111
aaatgattt

SEQ ID NO: 195097 - DNA, 9 bp, Unknown
  misc_feature (1)..( 9): Result.006 file - promoters50/4914111
taatggttt

SEQ ID NO: 195098 - DNA, 9 bp, Unknown
  misc_feature (1)..( 9): Result.006 file - promoters50/4914111
taatagtta

SEQ ID NO: 195099 - DNA, 8 bp, Unknown
  misc_feature (1)..( 8): Result.006 file - promoters50/4914111
atctggtt

SEQ ID NO: 195100 - DNA, 8 bp, Unknown
  misc_feature (1)..( 8): Result.006 file - promoters50/4914111
ttcttgtt

SEQ ID NO: 195101 - DNA, 8 bp, Unknown
  misc_feature (1)..( 8): Result.006 file - promoters50/4914111
ttcctgta

SEQ ID NO: 195102 - DNA, 13 bp, Unknown
  misc_feature (1)..( 13): Result.006 file - promoters50/4914111
ttcggtgattagt

SEQ ID NO: 195103 - DNA, 13 bp, Unknown
  misc_feature (1)..( 13): Result.006 file - promoters50/4914111
ttcgatgatgctg

SEQ ID NO: 195104 - DNA, 13 bp, Unknown
  misc_feature (1)..( 13): Result.006 file - promoters50/4914228
gttgatgctgctg

SEQ ID NO: 195105 - DNA, 8 bp, Unknown
  misc_feature (1)..( 8): Result.006 file - promoters50/4914228
gagaagaa

SEQ ID NO: 195106 - DNA, 8 bp, Unknown
  misc_feature (1)..( 8): Result.006 file - promoters50/4914228
ttgaagaa

SEQ ID NO: 195107 - DNA, 8 bp, Unknown
  misc_feature (1)..( 8): Result.006 file - promoters50/4914228
aagtagag

SEQ ID NO: 195108 - DNA, 7 bp, Unknown
  misc_feature (1)..( 7): Result.006 file - promoters50/4914228
gatggac

SEQ ID NO: 195109 - DNA, 7 bp, Unknown
  misc_feature (1)..( 7): Result.006 file - promoters50/4914228
gatggat

SEQ ID NO: 195110 - DNA, 7 bp, Unknown
  misc_feature (1)..( 7): Result.006 file - promoters50/4914228
gatcgat

SEQ ID NO: 195111 - DNA, 7 bp, Unknown
  misc_feature (1)..( 7): Result.006 file - promoters50/4914228
cagaaag

SEQ ID NO: 195112 - DNA, 7 bp, Unknown
  misc_feature (1)..( 7): Result.006 file - promoters50/4914228
aagaaag

SEQ ID NO: 195113 - DNA, 7 bp, Unknown
  misc_feature (1)..( 7): Result.006 file - promoters50/4914228
aagaaat

SEQ ID NO: 195114 - DNA, 10 bp, Unknown
  misc_feature (1)..( 10): Result.006 file - promoters50/4914228
agatactgat

SEQ ID NO: 195115 - DNA, 10 bp, Unknown
  misc_feature (1)..( 10): Result.006 file - promoters50/4914228
ttataatgat

SEQ ID NO: 195116 - DNA, 10 bp, Unknown
  misc_feature (1)..( 10): Result.006 file - promoters50/4914228
ttaaaatcga

SEQ ID NO: 195117 - DNA, 10 bp, Unknown
  misc_feature (1)..( 10): Result.006 file - promoters50/4914438
tcaaaatctg

SEQ ID NO: 195118 - DNA, 10 bp, Unknown
  misc_feature (1)..( 10): Result.006 file - promoters50/4914438
aaattgattt

SEQ ID NO: 195119 - DNA, 10 bp, Unknown
  misc_feature (1)..( 10): Result.006 file - promoters50/4914438
taattgatga

SEQ ID NO: 195120 - DNA, 10 bp, Unknown
  misc_feature (1)..( 10): Result.006 file - promoters50/4914438
agattgattt

SEQ ID NO: 195121 - DNA, 10 bp, Unknown
  misc_feature (1)..( 10): Result.006 file - promoters50/4914438
ttcttgattc

SEQ ID NO: 195122 - DNA, 10 bp, Unknown
  misc_feature (1)..( 10): Result.006 file - promoters50/4914438
gatttgattg

SEQ ID NO: 195123 - DNA, 10 bp, Unknown
  misc_feature (1)..( 10): Result.006 file - promoters50/4915127
gatttaattc

SEQ ID NO: 195124 - DNA, 9 bp, Unknown
  misc_feature (1)..( 9): Result.006 file - promoters50/4915127
actataaat

SEQ ID NO: 195125 - DNA, 9 bp, Unknown
  misc_feature (1)..( 9): Result.006 file - promoters50/4915127
tttataaaa

SEQ ID NO: 195126 - DNA, 9 bp, Unknown
  misc_feature (1)..( 9): Result.006 file - promoters50/4915127
actataaat

SEQ ID NO: 195127 - DNA, 10 bp, Unknown
  misc_feature (1)..( 10): Result.006 file - promoters50/4915127
actattaaag

SEQ ID NO: 195128 - DNA, 11 bp, Unknown
  misc_feature (1)..( 11): Result.006 file - promoters50/4915127
ggtatatatat

SEQ ID NO: 195129 - DNA, 11 bp, Unknown
  misc_feature (1)..( 11): Result.006 file - promoters50/4915163
tataagtatcg

SEQ ID NO: 195130 - DNA, 17 bp, Unknown
  misc_feature (1)..( 17): Result.006 file - promoters50/4915163
tgtattctacatgggcc

SEQ ID NO: 195131 - DNA, 17 bp, Unknown
  misc_feature (1)..( 17): Result.006 file - promoters50/4915163
ttgattctaaaatattg

SEQ ID NO: 195132 - DNA, 17 bp, Unknown
  misc_feature (1)..( 17): Result.006 file - promoters50/4915163
ttagttcttcatttcca

SEQ ID NO: 195133 - DNA, 17 bp, Unknown
  misc_feature (1)..( 17): Result.006 file - promoters50/4915163
taaattttaaaattatt

SEQ ID NO: 195134 - DNA, 17 bp, Unknown
  misc_feature (1)..( 17): Result.006 file - promoters50/4915163
caaattcatcacaataa

SEQ ID NO: 195135 - DNA, 17 bp, Unknown
  misc_feature (1)..( 17): Result.006 file - promoters50/4915163
taaattttgaaataatt

SEQ ID NO: 195136 - DNA, 17 bp, Unknown
  misc_feature (1)..( 17): Result.006 file - promoters50/4915163
tgtgttttgaaaagagt

SEQ ID NO: 195137 - DNA, 12 bp, Unknown
  misc_feature (1)..( 12): Result.006 file - promoters50/4915163
ctataaaaacca

SEQ ID NO: 195138 - DNA, 12 bp, Unknown
  misc_feature (1)..( 12): Result.006 file - promoters50/4915163
ctataaatatca

SEQ ID NO: 195139 - DNA, 12 bp, Unknown
  misc_feature (1)..( 12): Result.006 file - promoters50/4915163
ccataaaagcag

SEQ ID NO: 195140 - DNA, 13 bp, Unknown
  misc_feature (1)..( 13): Result.006 file - promoters50/4915163
atataataaccaa

SEQ ID NO: 195141 - DNA, 13 bp, Unknown
  misc_feature (1)..( 13): Result.006 file - promoters50/4915163
ttatataaacaaa

SEQ ID NO: 195142 - DNA, 13 bp, Unknown
  misc_feature (1)..( 13): Result.006 file - promoters50/4915163
cgataaatatccc

SEQ ID NO: 195143 - DNA, 13 bp, Unknown
  misc_feature (1)..( 13): Result.006 file - promoters50/4915163
tttataagtataa

SEQ ID NO: 195144 - DNA, 13 bp, Unknown
  misc_feature (1)..( 13): Result.006 file - promoters50/4915163
aatataagtaaca

SEQ ID NO: 195145 - DNA, 13 bp, Unknown
  misc_feature (1)..( 13): Result.006 file - promoters50/4915163
tttgtaacttcag

SEQ ID NO: 195146 - DNA, 13 bp, Unknown
  misc_feature (1)..( 13): Result.006 file - promoters50/4915163
tttaaaagtaaga

SEQ ID NO: 195147 - DNA, 13 bp, Unknown
  misc_feature (1)..( 13): Result.006 file - promoters50/4915163
cttataattatgc

SEQ ID NO: 195148 - DNA, 13 bp, Unknown
  misc_feature (1)..( 13): Result.006 file - promoters50/4915163
agatgaagtcaca

SEQ ID NO: 195149 - DNA, 13 bp, Unknown
  misc_feature (1)..( 13): Result.006 file - promoters50/4915163
tttgaaaagagtt

SEQ ID NO: 195150 - DNA, 14 bp, Unknown
  misc_feature (1)..( 14): Result.006 file - promoters50/4915163
atctttataagtat

SEQ ID NO: 195151 - DNA, 14 bp, Unknown
  misc_feature (1)..( 14): Result.006 file - promoters50/4915163
atctttatacaaaa

SEQ ID NO: 195152 - DNA, 14 bp, Unknown
  misc_feature (1)..( 14): Result.006 file - promoters50/4915163
aaatttgtaacttc

SEQ ID NO: 195153 - DNA, 14 bp, Unknown
  misc_feature (1)..( 14): Result.006 file - promoters50/4915163
cgttttaaaagtaa

SEQ ID NO: 195154 - DNA, 14 bp, Unknown
  misc_feature (1)..( 14): Result.006 file - promoters50/4915163
aaacttataattat

SEQ ID NO: 195155 - DNA, 14 bp, Unknown
  misc_feature (1)..( 14): Result.006 file - promoters50/4915199
tgttttgaaaagag

SEQ ID NO: 195156 - DNA, 6 bp, Unknown
  misc_feature (1)..( 6): Result.006 file - promoters50/4915199
tttctt

SEQ ID NO: 195157 - DNA, 6 bp, Unknown
  misc_feature (1)..( 6): Result.006 file - promoters50/4915199
tttctt

SEQ ID NO: 195158 - DNA, 6 bp, Unknown
  misc_feature (1)..( 6): Result.006 file - promoters50/4915199
tttctt

SEQ ID NO: 195159 - DNA, 13 bp, Unknown
  misc_feature (1)..( 13): Result.006 file - promoters50/4915199
cttgtttctctac

SEQ ID NO: 195160 - DNA, 13 bp, Unknown
  misc_feature (1)..( 13): Result.006 file - promoters50/4915199
atggtttctctga

SEQ ID NO: 195161 - DNA, 13 bp, Unknown
  misc_feature (1)..( 13): Result.006 file - promoters50/4915199
cttgtttcttttg

SEQ ID NO: 195162 - DNA, 13 bp, Unknown
  misc_feature (1)..( 13): Result.006 file - promoters50/4915199
atatattctgtga

SEQ ID NO: 195163 - DNA, 10 bp, Unknown
  misc_feature (1)..( 10): Result.006 file - promoters50/4915199
tcactgtttt

SEQ ID NO: 195164 - DNA, 10 bp, Unknown
  misc_feature (1)..( 10): Result.006 file - promoters50/4915199
tcactgttta

SEQ ID NO: 195165 - DNA, 10 bp, Unknown
  misc_feature (1)..( 10): Result.006 file - promoters50/4915199
ttaatgtttt

SEQ ID NO: 195166 - DNA, 8 bp, Unknown
  misc_feature (1)..( 8): Result.006 file - promoters50/4915199
gttaagag

SEQ ID NO: 195167 - DNA, 8 bp, Unknown
  misc_feature (1)..( 8): Result.006 file - promoters50/4915199
gtttagat

SEQ ID NO: 195168 - DNA, 8 bp, Unknown
  misc_feature (1)..( 8): Result.006 file - promoters50/4915199
aattagat

SEQ ID NO: 195169 - DNA, 8 bp, Unknown
  misc_feature (1)..( 8): Result.006 file - promoters50/4915199
tgttttgg

SEQ ID NO: 195170 - DNA, 8 bp, Unknown
  misc_feature (1)..( 8): Result.006 file - promoters50/4915199
tgtgttgt

SEQ ID NO: 195171 - DNA, 8 bp, Unknown
  misc_feature (1)..( 8): Result.006 file - promoters50/4915199
tgtttttg

SEQ ID NO: 195172 - DNA, 9 bp, Unknown
  misc_feature (1)..( 9): Result.006 file - promoters50/4915199
ttttggttc

SEQ ID NO: 195173 - DNA, 9 bp, Unknown
  misc_feature (1)..( 9): Result.006 file - promoters50/4915199
tgttgcttc

SEQ ID NO: 195174 - DNA, 9 bp, Unknown
  misc_feature (1)..( 9): Result.006 file - promoters50/4915199
tttttgttt

SEQ ID NO: 195175 - DNA, 7 bp, Unknown
  misc_feature (1)..( 7): Result.006 file - promoters50/4915199
cttgttt

SEQ ID NO: 195176 - DNA, 7 bp, Unknown
  misc_feature (1)..( 7): Result.006 file - promoters50/4915199
tttgttt

SEQ ID NO: 195177 - DNA, 7 bp, Unknown
  misc_feature (1)..( 7): Result.006 file - promoters50/4915199
tttgtta

SEQ ID NO: 195178 - DNA, 7 bp, Unknown
  misc_feature (1)..( 7): Result.006 file - promoters50/4915199
tgttttg

SEQ ID NO: 195179 - DNA, 7 bp, Unknown
  misc_feature (1)..( 7): Result.006 file - promoters50/4915199
tgttttt

SEQ ID NO: 195180 - DNA, 8 bp, Unknown
  misc_feature (1)..( 8): Result.006 file - promoters50/4915199
tgttgttg

SEQ ID NO: 195181 - DNA, 8 bp, Unknown
  misc_feature (1)..( 8): Result.006 file - promoters50/4915199
tgttttgg

SEQ ID NO: 195182 - DNA, 8 bp, Unknown
  misc_feature (1)..( 8): Result.006 file - promoters50/4915199
gtttttgg

SEQ ID NO: 195183 - DNA, 9 bp, Unknown
  misc_feature (1)..( 9): Result.006 file - promoters50/4915199
tgttgttgc

SEQ ID NO: 195184 - DNA, 9 bp, Unknown
  misc_feature (1)..( 9): Result.006 file - promoters50/4915199
tgttttgtt

SEQ ID NO: 195185 - DNA, 9 bp, Unknown
  misc_feature (1)..( 9): Result.006 file - promoters50/4915199
aatttggtt

SEQ ID NO: 195186 - DNA, 9 bp, Unknown
  misc_feature (1)..( 9): Result.006 file - promoters50/4915199
aatatggat

SEQ ID NO: 195187 - DNA, 12 bp, Unknown
  misc_feature (1)..( 12): Result.006 file - promoters50/4915199
gataaaaaatat

SEQ ID NO: 195188 - DNA, 12 bp, Unknown
  misc_feature (1)..( 12): Result.006 file - promoters50/4915199
aaagaaaattat

SEQ ID NO: 195189 - DNA, 12 bp, Unknown
  misc_feature (1)..( 12): Result.006 file - promoters50/4915199
atagaaaagtaa

SEQ ID NO: 195190 - DNA, 8 bp, Unknown
  misc_feature (1)..( 8): Result.006 file - promoters50/4915199
agttgtta

SEQ ID NO: 195191 - DNA, 8 bp, Unknown
  misc_feature (1)..( 8): Result.006 file - promoters50/4915199
tgttgttg

SEQ ID NO: 195192 - DNA, 8 bp, Unknown
  misc_feature (1)..( 8): Result.006 file - promoters50/4915244
tgtttttg

SEQ ID NO: 195193 - DNA, 9 bp, Unknown
  misc_feature (1)..( 9): Result.006 file - promoters50/4915244
aataaatag

SEQ ID NO: 195194 - DNA, 9 bp, Unknown
  misc_feature (1)..( 9): Result.006 file - promoters50/4915244
aattaatct

SEQ ID NO: 195195 - DNA, 9 bp, Unknown
  misc_feature (1)..( 9): Result.006 file - promoters50/4915244
aaaaaaaag

SEQ ID NO: 195196 - DNA, 9 bp, Unknown
  misc_feature (1)..( 9): Result.006 file - promoters50/4915244
tattactct

SEQ ID NO: 195197 - DNA, 9 bp, Unknown
  misc_feature (1)..( 9): Result.006 file - promoters50/4915244
tattacaat

SEQ ID NO: 195198 - DNA, 9 bp, Unknown
  misc_feature (1)..( 9): Result.006 file - promoters50/4915244
aaaaaatca

SEQ ID NO: 195199 - DNA, 11 bp, Unknown
  misc_feature (1)..( 11): Result.006 file - promoters50/4915244
agttgtttata

SEQ ID NO: 195200 - DNA, 11 bp, Unknown
  misc_feature (1)..( 11): Result.006 file - promoters50/4915244
tcatgtttaat

SEQ ID NO: 195201 - DNA, 11 bp, Unknown
  misc_feature (1)..( 11): Result.006 file - promoters50/4915244
atgagttcata

SEQ ID NO: 195202 - DNA, 11 bp, Unknown
  misc_feature (1)..( 11): Result.006 file - promoters50/4915244
ctttgcttaca

SEQ ID NO: 195203 - DNA, 11 bp, Unknown
  misc_feature (1)..( 11): Result.006 file - promoters50/4915244
cttggcttgct

SEQ ID NO: 195204 - DNA, 11 bp, Unknown
  misc_feature (1)..( 11): Result.006 file - promoters50/4915244
acatatttagc

SEQ ID NO: 195205 - DNA, 12 bp, Unknown
  misc_feature (1)..( 12): Result.006 file - promoters50/4915244
accgagtataaa

SEQ ID NO: 195206 - DNA, 12 bp, Unknown
  misc_feature (1)..( 12): Result.006 file - promoters50/4915244
tctacgtataat

SEQ ID NO: 195207 - DNA, 12 bp, Unknown
  misc_feature (1)..( 12): Result.006 file - promoters50/4915244
acggattataat

SEQ ID NO: 195208 - DNA, 12 bp, Unknown
  misc_feature (1)..( 12): Result.006 file - promoters50/4915244
gtgtattacaat

SEQ ID NO: 195209 - DNA, 12 bp, Unknown
  misc_feature (1)..( 12): Result.006 file - promoters50/4915244
actctatattac

SEQ ID NO: 195210 - DNA, 12 bp, Unknown
  misc_feature (1)..( 12): Result.006 file - promoters50/4915244
acaatgtacaaa

SEQ ID NO: 195211 - DNA, 11 bp, Unknown
  misc_feature (1)..( 11): Result.006 file - promoters50/4915244
cttttaaatta

SEQ ID NO: 195212 - DNA, 11 bp, Unknown
  misc_feature (1)..( 11): Result.006 file - promoters50/4915244
cttgtaatgtt

SEQ ID NO: 195213 - DNA, 11 bp, Unknown
  misc_feature (1)..( 11): Result.006 file - promoters50/4915244
atttcaattta

SEQ ID NO: 195214 - DNA, 11 bp, Unknown
  misc_feature (1)..( 11): Result.006 file - promoters50/4915244
tttttaattat

SEQ ID NO: 195215 - DNA, 11 bp, Unknown
  misc_feature (1)..( 11): Result.006 file - promoters50/4915244
atttccatttg

SEQ ID NO: 195216 - DNA, 11 bp, Unknown
  misc_feature (1)..( 11): Result.006 file - promoters50/4915347
ttcccaatttt

SEQ ID NO: 195217 - DNA, 11 bp, Unknown
  misc_feature (1)..( 11): Result.006 file - promoters50/4915347
aacttttgaat

SEQ ID NO: 195218 - DNA, 11 bp, Unknown
  misc_feature (1)..( 11): Result.006 file - promoters50/4915347
atttttttaat

SEQ ID NO: 195219 - DNA, 11 bp, Unknown
  misc_feature (1)..( 11): Result.006 file - promoters50/4915355
atatttttttt

SEQ ID NO: 195220 - DNA, 12 bp, Unknown
  misc_feature (1)..( 12): Result.006 file - promoters50/4915355
tttaaaatctgg

SEQ ID NO: 195221 - DNA, 12 bp, Unknown
  misc_feature (1)..( 12): Result.006 file - promoters50/4915355
aacaaaatctta

SEQ ID NO: 195222 - DNA, 12 bp, Unknown
  misc_feature (1)..( 12): Result.006 file - promoters50/4915355
accaaaaactgt

SEQ ID NO: 195223 - DNA, 12 bp, Unknown
  misc_feature (1)..( 12): Result.006 file - promoters50/4915355
aacataatcaat

SEQ ID NO: 195224 - DNA, 12 bp, Unknown
  misc_feature (1)..( 12): Result.006 file - promoters50/4915355
cttaaaatataa

SEQ ID NO: 195225 - DNA, 13 bp, Unknown
  misc_feature (1)..( 13): Result.006 file - promoters50/4915355
ttttaaaataatt

SEQ ID NO: 195226 - DNA, 13 bp, Unknown
  misc_feature (1)..( 13): Result.006 file - promoters50/4915355
gactaaaataact

SEQ ID NO: 195227 - DNA, 13 bp, Unknown
  misc_feature (1)..( 13): Result.006 file - promoters50/4915355
tataaaaacaatt

SEQ ID NO: 195228 - DNA, 13 bp, Unknown
  misc_feature (1)..( 13): Result.006 file - promoters50/4915355
ttttacaatgtca

SEQ ID NO: 195229 - DNA, 13 bp, Unknown
  misc_feature (1)..( 13): Result.006 file - promoters50/4915355
aactgaaatttta

SEQ ID NO: 195230 - DNA, 8 bp, Unknown
  misc_feature (1)..( 8): Result.006 file - promoters50/4915355
attaaacg

SEQ ID NO: 195231 - DNA, 8 bp, Unknown
  misc_feature (1)..( 8): Result.006 file - promoters50/4915355
tttaaact

SEQ ID NO: 195232 - DNA, 9 bp, Unknown
  misc_feature (1)..( 9): Result.006 file - promoters50/4915355
attcaaaaa

SEQ ID NO: 195233 - DNA, 9 bp, Unknown
  misc_feature (1)..( 9): Result.006 file - promoters50/4915355
tttcaaatg

SEQ ID NO: 195234 - DNA, 9 bp, Unknown
  misc_feature (1)..( 9): Result.006 file - promoters50/4915355
cttccaatg

SEQ ID NO: 195235 - DNA, 12 bp, Unknown
  misc_feature (1)..( 12): Result.006 file - promoters50/4915355
gatatatcaatt

SEQ ID NO: 195236 - DNA, 12 bp, Unknown
  misc_feature (1)..( 12): Result.006 file - promoters50/4915355
gatatagcaaaa

SEQ ID NO: 195237 - DNA, 12 bp, Unknown
  misc_feature (1)..( 12): Result.006 file - promoters50/4915355
caaatatcgatt

SEQ ID NO: 195238 - DNA, 12 bp, Unknown
  misc_feature (1)..( 12): Result.006 file - promoters50/4915355
aaaatataaatt

SEQ ID NO: 195239 - DNA, 12 bp, Unknown
  misc_feature (1)..( 12): Result.006 file - promoters50/4915384
aaaatatccaaa

SEQ ID NO: 195240 - DNA, 8 bp, Unknown
  misc_feature (1)..( 8): Result.006 file - promoters50/4915384
atttgatt

SEQ ID NO: 195241 - DNA, 8 bp, Unknown
  misc_feature (1)..( 8): Result.006 file - promoters50/4915384
ttttaatt

SEQ ID NO: 195242 - DNA, 8 bp, Unknown
  misc_feature (1)..( 8): Result.006 file - promoters50/4915384
ttttaaga

SEQ ID NO: 195243 - DNA, 9 bp, Unknown
  misc_feature (1)..( 9): Result.006 file - promoters50/4915384
ttttatttt

SEQ ID NO: 195244 - DNA, 9 bp, Unknown
  misc_feature (1)..( 9): Result.006 file - promoters50/4915384
gtttatttt

SEQ ID NO: 195245 - DNA, 10 bp, Unknown
  misc_feature (1)..( 10): Result.006 file - promoters50/4915384
atttgattat

SEQ ID NO: 195246 - DNA, 10 bp, Unknown
  misc_feature (1)..( 10): Result.006 file - promoters50/4915384
ggtttattca

SEQ ID NO: 195247 - DNA, 8 bp, Unknown
  misc_feature (1)..( 8): Result.006 file - promoters50/4915384
ttaagaga

SEQ ID NO: 195248 - DNA, 8 bp, Unknown
  misc_feature (1)..( 8): Result.006 file - promoters50/4915384
ttaagaat

SEQ ID NO: 195249 - DNA, 8 bp, Unknown
  misc_feature (1)..( 8): Result.006 file - promoters50/4915384
ataagaga

SEQ ID NO: 195250 - DNA, 8 bp, Unknown
  misc_feature (1)..( 8): Result.006 file - promoters50/4915384
tcaagaga

SEQ ID NO: 195251 - DNA, 9 bp, Unknown
  misc_feature (1)..( 9): Result.006 file - promoters50/4915384
gaaaagaaa

SEQ ID NO: 195252 - DNA, 9 bp, Unknown
  misc_feature (1)..( 9): Result.006 file - promoters50/4915384
gaaaagtat

SEQ ID NO: 195253 - DNA, 9 bp, Unknown
  misc_feature (1)..( 9): Result.006 file - promoters50/4915384
gcaaaggta

SEQ ID NO: 195254 - DNA, 7 bp, Unknown
  misc_feature (1)..( 7): Result.006 file - promoters50/4915384
taagaga

SEQ ID NO: 195255 - DNA, 7 bp, Unknown
  misc_feature (1)..( 7): Result.006 file - promoters50/4915384
caagaga

SEQ ID NO: 195256 - DNA, 7 bp, Unknown
  misc_feature (1)..( 7): Result.006 file - promoters50/4915384
taagaga

SEQ ID NO: 195257 - DNA, 9 bp, Unknown
  misc_feature (1)..( 9): Result.006 file - promoters50/4915384
aaaaaatga

SEQ ID NO: 195258 - DNA, 9 bp, Unknown
  misc_feature (1)..( 9): Result.006 file - promoters50/4915384
tcaaattga

SEQ ID NO: 195259 - DNA, 9 bp, Unknown
  misc_feature (1)..( 9): Result.006 file - promoters50/4915384
tcacattct

SEQ ID NO: 195260 - DNA, 13 bp, Unknown
  misc_feature (1)..( 13): Result.006 file - promoters50/4915384
ttttaacttgttg

SEQ ID NO: 195261 - DNA, 13 bp, Unknown
  misc_feature (1)..( 13): Result.006 file - promoters50/4915384
ttttaaattatta

SEQ ID NO: 195262 - DNA, 13 bp, Unknown
  misc_feature (1)..( 13): Result.006 file - promoters50/4915384
gtttaaataatta

SEQ ID NO: 195263 - DNA, 8 bp, Unknown
  misc_feature (1)..( 8): Result.006 file - promoters50/4915384
aaatatgt

SEQ ID NO: 195264 - DNA, 8 bp, Unknown
  misc_feature (1)..( 8): Result.006 file - promoters50/4915384
aaatttgt

SEQ ID NO: 195265 - DNA, 8 bp, Unknown
  misc_feature (1)..( 8): Result.006 file - promoters50/4915384
agatttgt

SEQ ID NO: 195266 - DNA, 11 bp, Unknown
  misc_feature (1)..( 11): Result.006 file - promoters50/4915384
tgtttaaataa

SEQ ID NO: 195267 - DNA, 11 bp, Unknown
  misc_feature (1)..( 11): Result.006 file - promoters50/4915384
tgtgtaaagct

SEQ ID NO: 195268 - DNA, 11 bp, Unknown
  misc_feature (1)..( 11): Result.006 file - promoters50/4915395
gttttcaataa

SEQ ID NO: 195269 - DNA, 9 bp, Unknown
  misc_feature (1)..( 9): Result.006 file - promoters50/4915395
catataaaa

SEQ ID NO: 195270 - DNA, 9 bp, Unknown
  misc_feature (1)..( 9): Result.006 file - promoters50/4915395
tttataaaa

SEQ ID NO: 195271 - DNA, 9 bp, Unknown
  misc_feature (1)..( 9): Result.006 file - promoters50/4915395
tttttaaac

SEQ ID NO: 195272 - DNA, 7 bp, Unknown
  misc_feature (1)..( 7): Result.006 file - promoters50/4915395
caaatgg

SEQ ID NO: 195273 - DNA, 7 bp, Unknown
  misc_feature (1)..( 7): Result.006 file - promoters50/4915395
caaatga

SEQ ID NO: 195274 - DNA, 7 bp, Unknown
  misc_feature (1)..( 7): Result.006 file - promoters50/4915395
caattga

SEQ ID NO: 195275 - DNA, 8 bp, Unknown
  misc_feature (1)..( 8): Result.006 file - promoters50/4915395
aaattaaa

SEQ ID NO: 195276 - DNA, 8 bp, Unknown
  misc_feature (1)..( 8): Result.006 file - promoters50/4915395
aaaataaa

SEQ ID NO: 195277 - DNA, 8 bp, Unknown
  misc_feature (1)..( 8): Result.006 file - promoters50/4915420
aaaagata

SEQ ID NO: 195278 - DNA, 11 bp, Unknown
  misc_feature (1)..( 11): Result.006 file - promoters50/4915420
agtaatatttg

SEQ ID NO: 195279 - DNA, 11 bp, Unknown
  misc_feature (1)..( 11): Result.006 file - promoters50/4915420
attaagatttt

SEQ ID NO: 195280 - DNA, 11 bp, Unknown
  misc_feature (1)..( 11): Result.006 file - promoters50/4915420
agtgatatgag

SEQ ID NO: 195281 - DNA, 11 bp, Unknown
  misc_feature (1)..( 11): Result.006 file - promoters50/4915420
gagaatttttg

SEQ ID NO: 195282 - DNA, 11 bp, Unknown
  misc_feature (1)..( 11): Result.006 file - promoters50/4915420
cttaaaattga

SEQ ID NO: 195283 - DNA, 11 bp, Unknown
  misc_feature (1)..( 11): Result.006 file - promoters50/4915420
gagaatttttg

SEQ ID NO: 195284 - DNA, 11 bp, Unknown
  misc_feature (1)..( 11): Result.006 file - promoters50/4915420
aataaagttgt

SEQ ID NO: 195285 - DNA, 11 bp, Unknown
  misc_feature (1)..( 11): Result.006 file - promoters50/4915420
cttacaatttc

SEQ ID NO: 195286 - DNA, 8 bp, Unknown
  misc_feature (1)..( 8): Result.006 file - promoters50/4915420
atatgatt

SEQ ID NO: 195287 - DNA, 8 bp, Unknown
  misc_feature (1)..( 8): Result.006 file - promoters50/4915420
atatgagt

SEQ ID NO: 195288 - DNA, 8 bp, Unknown
  misc_feature (1)..( 8): Result.006 file - promoters50/4915420
atattagt

SEQ ID NO: 195289 - DNA, 8 bp, Unknown
  misc_feature (1)..( 8): Result.006 file - promoters50/4915420
atattagt

SEQ ID NO: 195290 - DNA, 8 bp, Unknown
  misc_feature (1)..( 8): Result.006 file - promoters50/4915420
ttattaga

SEQ ID NO: 195291 - DNA, 8 bp, Unknown
  misc_feature (1)..( 8): Result.006 file - promoters50/4915420
ttattaca

SEQ ID NO: 195292 - DNA, 10 bp, Unknown
  misc_feature (1)..( 10): Result.006 file - promoters50/4915420
tgattggtac

SEQ ID NO: 195293 - DNA, 10 bp, Unknown
  misc_feature (1)..( 10): Result.006 file - promoters50/4915420
atattagtat

SEQ ID NO: 195294 - DNA, 10 bp, Unknown
  misc_feature (1)..( 10): Result.006 file - promoters50/4915420
tttgtagtat

SEQ ID NO: 195295 - DNA, 10 bp, Unknown
  misc_feature (1)..( 10): Result.006 file - promoters50/4915420
atatgagtga

SEQ ID NO: 195296 - DNA, 10 bp, Unknown
  misc_feature (1)..( 10): Result.006 file - promoters50/4915420
ttattagact

SEQ ID NO: 195297 - DNA, 10 bp, Unknown
  misc_feature (1)..( 10): Result.006 file - promoters50/4915511
tgcttattac

SEQ ID NO: 195298 - DNA, 7 bp, Unknown
  misc_feature (1)..( 7): Result.006 file - promoters50/4915511
taacaca

SEQ ID NO: 195299 - DNA, 7 bp, Unknown
  misc_feature (1)..( 7): Result.006 file - promoters50/4915511
taaaaca

SEQ ID NO: 195300 - DNA, 7 bp, Unknown
  misc_feature (1)..( 7): Result.006 file - promoters50/4915511
aaaaaca

SEQ ID NO: 195301 - DNA, 8 bp, Unknown
  misc_feature (1)..( 8): Result.006 file - promoters50/4915511
atcttaaa

SEQ ID NO: 195302 - DNA, 8 bp, Unknown
  misc_feature (1)..( 8): Result.006 file - promoters50/4915511
ctctgaaa

SEQ ID NO: 195303 - DNA, 8 bp, Unknown
  misc_feature (1)..( 8): Result.006 file - promoters50/4915511
ctcagaag

SEQ ID NO: 195304 - DNA, 8 bp, Unknown
  misc_feature (1)..( 8): Result.006 file - promoters50/4915511
cagttata

SEQ ID NO: 195305 - DNA, 8 bp, Unknown
  misc_feature (1)..( 8): Result.006 file - promoters50/4915511
cagttaat

SEQ ID NO: 195306 - DNA, 8 bp, Unknown
  misc_feature (1)..( 8): Result.006 file - promoters50/4915511
gagttata

SEQ ID NO: 195307 - DNA, 6 bp, Unknown
  misc_feature (1)..( 6): Result.006 file - promoters50/4915511
aaaacc

SEQ ID NO: 195308 - DNA, 6 bp, Unknown
  misc_feature (1)..( 6): Result.006 file - promoters50/4915511
aaaacc

SEQ ID NO: 195309 - DNA, 6 bp, Unknown
  misc_feature (1)..( 6): Result.006 file - promoters50/4915606
aaaacc

SEQ ID NO: 195310 - DNA, 10 bp, Unknown
  misc_feature (1)..( 10): Result.006 file - promoters50/4915606
tttaaattta

SEQ ID NO: 195311 - DNA, 10 bp, Unknown
  misc_feature (1)..( 10): Result.006 file - promoters50/4915606
ttttaatgat

SEQ ID NO: 195312 - DNA, 10 bp, Unknown
  misc_feature (1)..( 10): Result.006 file - promoters50/4915606
tttaagtttc

SEQ ID NO: 195313 - DNA, 10 bp, Unknown
  misc_feature (1)..( 10): Result.006 file - promoters50/4915606
aattaatgta

SEQ ID NO: 195314 - DNA, 10 bp, Unknown
  misc_feature (1)..( 10): Result.006 file - promoters50/4915606
gattaatttc

SEQ ID NO: 195315 - DNA, 10 bp, Unknown
  misc_feature (1)..( 10): Result.006 file - promoters50/4915606
caaaaataat

SEQ ID NO: 195316 - DNA, 12 bp, Unknown
  misc_feature (1)..( 12): Result.006 file - promoters50/4915606
aaaaacaaagac

SEQ ID NO: 195317 - DNA, 12 bp, Unknown
  misc_feature (1)..( 12): Result.006 file - promoters50/4915606
taaagcaaacaa

SEQ ID NO: 195318 - DNA, 12 bp, Unknown
  misc_feature (1)..( 12): Result.006 file - promoters50/4915606
ataaataaaaga

SEQ ID NO: 195319 - DNA, 12 bp, Unknown
  misc_feature (1)..( 12): Result.006 file - promoters50/4915606
aaaaccaaaacc

SEQ ID NO: 195320 - DNA, 12 bp, Unknown
  misc_feature (1)..( 12): Result.006 file - promoters50/4915606
gaaagaaaaaca

SEQ ID NO: 195321 - DNA, 12 bp, Unknown
  misc_feature (1)..( 12): Result.006 file - promoters50/4915606
aaaaacacggct

SEQ ID NO: 195322 - DNA, 12 bp, Unknown
  misc_feature (1)..( 12): Result.006 file - promoters50/4915606
acaaccaatgga

SEQ ID NO: 195323 - DNA, 15 bp, Unknown
  misc_feature (1)..( 15): Result.006 file - promoters50/4915606
ctacttattccatta

SEQ ID NO: 195324 - DNA, 15 bp, Unknown
  misc_feature (1)..( 15): Result.006 file - promoters50/4915606
aaactcattcaatta

SEQ ID NO: 195325 - DNA, 15 bp, Unknown
  misc_feature (1)..( 15): Result.006 file - promoters50/4915606
gaaatcataatagag

SEQ ID NO: 195326 - DNA, 15 bp, Unknown
  misc_feature (1)..( 15): Result.006 file - promoters50/4915606
aaaataataataaaa

SEQ ID NO: 195327 - DNA, 15 bp, Unknown
  misc_feature (1)..( 15): Result.006 file - promoters50/4915606
caaactattcaaaac

SEQ ID NO: 195328 - DNA, 15 bp, Unknown
  misc_feature (1)..( 15): Result.006 file - promoters50/4915606
aaaattaaagtcaat

SEQ ID NO: 195329 - DNA, 10 bp, Unknown
  misc_feature (1)..( 10): Result.006 file - promoters50/4915606
aaaaaaaaac

SEQ ID NO: 195330 - DNA, 10 bp, Unknown
  misc_feature (1)..( 10): Result.006 file - promoters50/4915606
taaataaaag

SEQ ID NO: 195331 - DNA, 10 bp, Unknown
  misc_feature (1)..( 10): Result.006 file - promoters50/4915606
aaaaccaaaa

SEQ ID NO: 195332 - DNA, 10 bp, Unknown
  misc_feature (1)..( 10): Result.006 file - promoters50/4915606
gaaagaaaaa

SEQ ID NO: 195333 - DNA, 10 bp, Unknown
  misc_feature (1)..( 10): Result.006 file - promoters50/4915606
aaaaacacgg

SEQ ID NO: 195334 - DNA, 10 bp, Unknown
  misc_feature (1)..( 10): Result.006 file - promoters50/4915606
acaaccaatg

SEQ ID NO: 195335 - DNA, 11 bp, Unknown
  misc_feature (1)..( 11): Result.006 file - promoters50/4915606
ccatataaata

SEQ ID NO: 195336 - DNA, 11 bp, Unknown
  misc_feature (1)..( 11): Result.006 file - promoters50/4915606
acatatatata

SEQ ID NO: 195337 - DNA, 11 bp, Unknown
  misc_feature (1)..( 11): Result.006 file - promoters50/4915606
ccatataaatt

SEQ ID NO: 195338 - DNA, 11 bp, Unknown
  misc_feature (1)..( 11): Result.006 file - promoters50/4915606
tcctatatata

SEQ ID NO: 195339 - DNA, 11 bp, Unknown
  misc_feature (1)..( 11): Result.006 file - promoters50/4915606
ttgtatatata

SEQ ID NO: 195340 - DNA, 11 bp, Unknown
  misc_feature (1)..( 11): Result.006 file - promoters50/4915606
tagtatttatt

SEQ ID NO: 195341 - DNA, 12 bp, Unknown
  misc_feature (1)..( 12): Result.006 file - promoters50/4915606
agaaagacaaat

SEQ ID NO: 195342 - DNA, 12 bp, Unknown
  misc_feature (1)..( 12): Result.006 file - promoters50/4915606
tgaaagagttta

SEQ ID NO: 195343 - DNA, 12 bp, Unknown
  misc_feature (1)..( 12): Result.006 file - promoters50/4915606
aaaaagtttatt

SEQ ID NO: 195344 - DNA, 12 bp, Unknown
  misc_feature (1)..( 12): Result.006 file - promoters50/4915606
gaaccgttaatt

SEQ ID NO: 195345 - DNA, 12 bp, Unknown
  misc_feature (1)..( 12): Result.006 file - promoters50/4915606
tcaaaatttatc

SEQ ID NO: 195346 - DNA, 12 bp, Unknown
  misc_feature (1)..( 12): Result.006 file - promoters50/4915606
atctaatatata

SEQ ID NO: 195347 - DNA, 12 bp, Unknown
  misc_feature (1)..( 12): Result.006 file - promoters50/4915606
tagttatatatg

SEQ ID NO: 195348 - DNA, 10 bp, Unknown
  misc_feature (1)..( 10): Result.006 file - promoters50/4915606
cgtgatttat

SEQ ID NO: 195349 - DNA, 10 bp, Unknown
  misc_feature (1)..( 10): Result.006 file - promoters50/4915606
caagatttac

SEQ ID NO: 195350 - DNA, 10 bp, Unknown
  misc_feature (1)..( 10): Result.006 file - promoters50/4915606
ttagagttac

SEQ ID NO: 195351 - DNA, 10 bp, Unknown
  misc_feature (1)..( 10): Result.006 file - promoters50/4915606
aaagatttta

SEQ ID NO: 195352 - DNA, 10 bp, Unknown
  misc_feature (1)..( 10): Result.006 file - promoters50/4915606
aaatattaat

SEQ ID NO: 195353 - DNA, 10 bp, Unknown
  misc_feature (1)..( 10): Result.006 file - promoters50/4915606
aaaaatttac

SEQ ID NO: 195354 - DNA, 9 bp, Unknown
  misc_feature (1)..( 9): Result.006 file - promoters50/4915606
aaattgatc

SEQ ID NO: 195355 - DNA, 9 bp, Unknown
  misc_feature (1)..( 9): Result.006 file - promoters50/4915606
aaatttatc

SEQ ID NO: 195356 - DNA, 9 bp, Unknown
  misc_feature (1)..( 9): Result.006 file - promoters50/4915606
aaattttga

SEQ ID NO: 195357 - DNA, 10 bp, Unknown
  misc_feature (1)..( 10): Result.006 file - promoters50/4915606
aaagtttatt

SEQ ID NO: 195358 - DNA, 10 bp, Unknown
  misc_feature (1)..( 10): Result.006 file - promoters50/4915606
ctaatatata

SEQ ID NO: 195359 - DNA, 10 bp, Unknown
  misc_feature (1)..( 10): Result.006 file - promoters50/4915606
gttatatatg

SEQ ID NO: 195360 - DNA, 9 bp, Unknown
  misc_feature (1)..( 9): Result.006 file - promoters50/4915606
taaattttg

SEQ ID NO: 195361 - DNA, 9 bp, Unknown
  misc_feature (1)..( 9): Result.006 file - promoters50/4915606
aaaagttta

SEQ ID NO: 195362 - DNA, 9 bp, Unknown
  misc_feature (1)..( 9): Result.006 file - promoters50/4915606
aaaatttat

SEQ ID NO: 195363 - DNA, 10 bp, Unknown
  misc_feature (1)..( 10): Result.006 file - promoters50/4915606
aaagagttta

SEQ ID NO: 195364 - DNA, 10 bp, Unknown
  misc_feature (1)..( 10): Result.006 file - promoters50/4915606
tctaatatat

SEQ ID NO: 195365 - DNA, 10 bp, Unknown
  misc_feature (1)..( 10): Result.006 file - promoters50/4915606
agttatatat

SEQ ID NO: 195366 - DNA, 11 bp, Unknown
  misc_feature (1)..( 11): Result.006 file - promoters50/4915606
tttttattttt

SEQ ID NO: 195367 - DNA, 11 bp, Unknown
  misc_feature (1)..( 11): Result.006 file - promoters50/4915606
ttcttatttat

SEQ ID NO: 195368 - DNA, 11 bp, Unknown
  misc_feature (1)..( 11): Result.006 file - promoters50/4915606
tgtttcttttt

SEQ ID NO: 195369 - DNA, 11 bp, Unknown
  misc_feature (1)..( 11): Result.006 file - promoters50/4915606
cgttaattttt

SEQ ID NO: 195370 - DNA, 11 bp, Unknown
  misc_feature (1)..( 11): Result.006 file - promoters50/4915606
aattaattttc

SEQ ID NO: 195371 - DNA, 11 bp, Unknown
  misc_feature (1)..( 11): Result.006 file - promoters50/4915668
aattcattata

SEQ ID NO: 195372 - DNA, 7 bp, Unknown
  misc_feature (1)..( 7): Result.006 file - promoters50/4915668
taccaat

SEQ ID NO: 195373 - DNA, 7 bp, Unknown
  misc_feature (1)..( 7): Result.006 file - promoters50/4915668
tacgaat

SEQ ID NO: 195374 - DNA, 7 bp, Unknown
  misc_feature (1)..( 7): Result.006 file - promoters50/4915668
taccaaa

SEQ ID NO: 195375 - DNA, 10 bp, Unknown
  misc_feature (1)..( 10): Result.006 file - promoters50/4915668
tgatgcgtta

SEQ ID NO: 195376 - DNA, 10 bp, Unknown
  misc_feature (1)..( 10): Result.006 file - promoters50/4915668
gaatgtgtta

SEQ ID NO: 195377 - DNA, 10 bp, Unknown
  misc_feature (1)..( 10): Result.006 file - promoters50/4915694
gaatttgttt

SEQ ID NO: 195378 - DNA, 12 bp, Unknown
  misc_feature (1)..( 12): Result.006 file - promoters50/4915694
gatttaaatcaa

SEQ ID NO: 195379 - DNA, 12 bp, Unknown
  misc_feature (1)..( 12): Result.006 file - promoters50/4915694
gattcaaaatcc

SEQ ID NO: 195380 - DNA, 12 bp, Unknown
  misc_feature (1)..( 12): Result.006 file - promoters50/4915694
gttttaaataat

SEQ ID NO: 195381 - DNA, 12 bp, Unknown
  misc_feature (1)..( 12): Result.006 file - promoters50/4915694
cattcaaatttt

SEQ ID NO: 195382 - DNA, 12 bp, Unknown
  misc_feature (1)..( 12): Result.006 file - promoters50/4915694
tttgcaaatttt

SEQ ID NO: 195383 - DNA, 9 bp, Unknown
  misc_feature (1)..( 9): Result.006 file - promoters50/4915694
atttacaat

SEQ ID NO: 195384 - DNA, 9 bp, Unknown
  misc_feature (1)..( 9): Result.006 file - promoters50/4915694
tttttcaaa

SEQ ID NO: 195385 - DNA, 9 bp, Unknown
  misc_feature (1)..( 9): Result.006 file - promoters50/4915694
attttcaaa

SEQ ID NO: 195386 - DNA, 9 bp, Unknown
  misc_feature (1)..( 9): Result.006 file - promoters50/4915694
tagttcaaa

SEQ ID NO: 195387 - DNA, 9 bp, Unknown
  misc_feature (1)..( 9): Result.006 file - promoters50/4915694
ttttgcaaa

SEQ ID NO: 195388 - DNA, 9 bp, Unknown
  misc_feature (1)..( 9): Result.006 file - promoters50/4915694
ctacaaaat

SEQ ID NO: 195389 - DNA, 9 bp, Unknown
  misc_feature (1)..( 9): Result.006 file - promoters50/4915694
ctacaagaa

SEQ ID NO: 195390 - DNA, 9 bp, Unknown
  misc_feature (1)..( 9): Result.006 file - promoters50/4915694
ttacaaaaa

SEQ ID NO: 195391 - DNA, 9 bp, Unknown
  misc_feature (1)..( 9): Result.006 file - promoters50/4915694
ttacaaaat

SEQ ID NO: 195392 - DNA, 14 bp, Unknown
  misc_feature (1)..( 14): Result.006 file - promoters50/4915694
actatttaacgttt

SEQ ID NO: 195393 - DNA, 14 bp, Unknown
  misc_feature (1)..( 14): Result.006 file - promoters50/4915694
aatatttatgtaag

SEQ ID NO: 195394 - DNA, 14 bp, Unknown
  misc_feature (1)..( 14): Result.006 file - promoters50/4915694
aatattttttgttt

SEQ ID NO: 195395 - DNA, 15 bp, Unknown
  misc_feature (1)..( 15): Result.006 file - promoters50/4915694
cttatcttttttttg

SEQ ID NO: 195396 - DNA, 13 bp, Unknown
  misc_feature (1)..( 13): Result.006 file - promoters50/4915694
ttaatcaataaat

SEQ ID NO: 195397 - DNA, 13 bp, Unknown
  misc_feature (1)..( 13): Result.006 file - promoters50/4915694
gtagtcaatattt

SEQ ID NO: 195398 - DNA, 13 bp, Unknown
  misc_feature (1)..( 13): Result.006 file - promoters50/4915694
ttaatcaatttat

SEQ ID NO: 195399 - DNA, 13 bp, Unknown
  misc_feature (1)..( 13): Result.006 file - promoters50/4915694
atcctcaatctat

SEQ ID NO: 195400 - DNA, 9 bp, Unknown
  misc_feature (1)..( 9): Result.006 file - promoters50/4915694
ctaatttcg

SEQ ID NO: 195401 - DNA, 9 bp, Unknown
  misc_feature (1)..( 9): Result.006 file - promoters50/4915694
ctaaattcc

SEQ ID NO: 195402 - DNA, 9 bp, Unknown
  misc_feature (1)..( 9): Result.006 file - promoters50/4915694
ataatttta

SEQ ID NO: 195403 - DNA, 10 bp, Unknown
  misc_feature (1)..( 10): Result.006 file - promoters50/4915694
ggaatattaa

SEQ ID NO: 195404 - DNA, 9 bp, Unknown
  misc_feature (1)..( 9): Result.006 file - promoters50/4915694
aaaatttta

SEQ ID NO: 195405 - DNA, 9 bp, Unknown
  misc_feature (1)..( 9): Result.006 file - promoters50/4915694
caaattttg

SEQ ID NO: 195406 - DNA, 9 bp, Unknown
  misc_feature (1)..( 9): Result.006 file - promoters50/4915694
caacttttt

SEQ ID NO: 195407 - DNA, 9 bp, Unknown
  misc_feature (1)..( 9): Result.006 file - promoters50/4915694
gttattttg

SEQ ID NO: 195408 - DNA, 11 bp, Unknown
  misc_feature (1)..( 11): Result.006 file - promoters50/4915694
attttaatgat

SEQ ID NO: 195409 - DNA, 11 bp, Unknown
  misc_feature (1)..( 11): Result.006 file - promoters50/4915694
ttttgaataaa

SEQ ID NO: 195410 - DNA, 12 bp, Unknown
  misc_feature (1)..( 12): Result.006 file - promoters50/4915694
cttgtgatttca

SEQ ID NO: 195411 - DNA, 12 bp, Unknown
  misc_feature (1)..( 12): Result.006 file - promoters50/4915701
attttgaagaaa

SEQ ID NO: 195412 - DNA, 10 bp, Unknown
  misc_feature (1)..( 10): Result.006 file - promoters50/4915701
tgtaatcggg

SEQ ID NO: 195413 - DNA, 10 bp, Unknown
  misc_feature (1)..( 10): Result.006 file - promoters50/4915701
tgtgatcgaa

SEQ ID NO: 195414 - DNA, 10 bp, Unknown
  misc_feature (1)..( 10): Result.006 file - promoters50/4915701
ctaaattggg

SEQ ID NO: 195415 - DNA, 9 bp, Unknown
  misc_feature (1)..( 9): Result.006 file - promoters50/4915701
tcgttgtaa

SEQ ID NO: 195416 - DNA, 9 bp, Unknown
  misc_feature (1)..( 9): Result.006 file - promoters50/4915701
tcggtgttg

SEQ ID NO: 195417 - DNA, 9 bp, Unknown
  misc_feature (1)..( 9): Result.006 file - promoters50/4915709
tgggttttg

SEQ ID NO: 195418 - DNA, 8 bp, Unknown
  misc_feature (1)..( 8): Result.006 file - promoters50/4915709
tttgattt

SEQ ID NO: 195419 - DNA, 8 bp, Unknown
  misc_feature (1)..( 8): Result.006 file - promoters50/4915709
attgcttt

SEQ ID NO: 195420 - DNA, 8 bp, Unknown
  misc_feature (1)..( 8): Result.006 file - promoters50/4915724
attgcttc

SEQ ID NO: 195421 - DNA, 13 bp, Unknown
  misc_feature (1)..( 13): Result.006 file - promoters50/4915724
aatcaaggagaat

SEQ ID NO: 195422 - DNA, 13 bp, Unknown
  misc_feature (1)..( 13): Result.006 file - promoters50/4915724
aataaagaagaat

SEQ ID NO: 195423 - DNA, 13 bp, Unknown
  misc_feature (1)..( 13): Result.006 file - promoters50/4915724
aatcaaaattatt

SEQ ID NO: 195424 - DNA, 13 bp, Unknown
  misc_feature (1)..( 13): Result.006 file - promoters50/4915724
gatacagaaagga

SEQ ID NO: 195425 - DNA, 10 bp, Unknown
  misc_feature (1)..( 10): Result.006 file - promoters50/4915724
ttaaaaaaag

SEQ ID NO: 195426 - DNA, 10 bp, Unknown
  misc_feature (1)..( 10): Result.006 file - promoters50/4915724
ctaaaaacag

SEQ ID NO: 195427 - DNA, 10 bp, Unknown
  misc_feature (1)..( 10): Result.006 file - promoters50/4915724
ataaaaaaag

SEQ ID NO: 195428 - DNA, 10 bp, Unknown
  misc_feature (1)..( 10): Result.006 file - promoters50/4915724
ataaaacaaa

SEQ ID NO: 195429 - DNA, 14 bp, Unknown
  misc_feature (1)..( 14): Result.006 file - promoters50/4915724
actaatataatgtt

SEQ ID NO: 195430 - DNA, 14 bp, Unknown
  misc_feature (1)..( 14): Result.006 file - promoters50/4915724
actaaaatacaacc

SEQ ID NO: 195431 - DNA, 14 bp, Unknown
  misc_feature (1)..( 14): Result.006 file - promoters50/4915724
aataatattttccc

SEQ ID NO: 195432 - DNA, 14 bp, Unknown
  misc_feature (1)..( 14): Result.006 file - promoters50/4915745
attgaaatccaacc

SEQ ID NO: 195433 - DNA, 9 bp, Unknown
  misc_feature (1)..( 9): Result.006 file - promoters50/4915745
atatctttt

SEQ ID NO: 195434 - DNA, 9 bp, Unknown
  misc_feature (1)..( 9): Result.006 file - promoters50/4915745
atatttttt

SEQ ID NO: 195435 - DNA, 9 bp, Unknown
  misc_feature (1)..( 9): Result.006 file - promoters50/4915745
aagtttttg

SEQ ID NO: 195436 - DNA, 9 bp, Unknown
  misc_feature (1)..( 9): Result.006 file - promoters50/4915745
acattttta

SEQ ID NO: 195437 - DNA, 8 bp, Unknown
  misc_feature (1)..( 8): Result.006 file - promoters50/4915745
aattgatc

SEQ ID NO: 195438 - DNA, 8 bp, Unknown
  misc_feature (1)..( 8): Result.006 file - promoters50/4915745
aattgatt

SEQ ID NO: 195439 - DNA, 8 bp, Unknown
  misc_feature (1)..( 8): Result.006 file - promoters50/4915745
gattcatt

SEQ ID NO: 195440 - DNA, 8 bp, Unknown
  misc_feature (1)..( 8): Result.006 file - promoters50/4915745
ttttacta

SEQ ID NO: 195441 - DNA, 8 bp, Unknown
  misc_feature (1)..( 8): Result.006 file - promoters50/4915745
ttttacta

SEQ ID NO: 195442 - DNA, 8 bp, Unknown
  misc_feature (1)..( 8): Result.006 file - promoters50/4915774
cattacta

SEQ ID NO: 195443 - DNA, 7 bp, Unknown
  misc_feature (1)..( 7): Result.006 file - promoters50/4915774
ctatatt

SEQ ID NO: 195444 - DNA, 7 bp, Unknown
  misc_feature (1)..( 7): Result.006 file - promoters50/4915774
atatatt

SEQ ID NO: 195445 - DNA, 7 bp, Unknown
  misc_feature (1)..( 7): Result.006 file - promoters50/4915774
ctatata

SEQ ID NO: 195446 - DNA, 8 bp, Unknown
  misc_feature (1)..( 8): Result.006 file - promoters50/4915774
caattaag

SEQ ID NO: 195447 - DNA, 8 bp, Unknown
  misc_feature (1)..( 8): Result.006 file - promoters50/4915774
taataaag

SEQ ID NO: 195448 - DNA, 8 bp, Unknown
  misc_feature (1)..( 8): Result.006 file - promoters50/4915774
taataata

SEQ ID NO: 195449 - DNA, 9 bp, Unknown
  misc_feature (1)..( 9): Result.006 file - promoters50/4915774
tcttcgagt

SEQ ID NO: 195450 - DNA, 9 bp, Unknown
  misc_feature (1)..( 9): Result.006 file - promoters50/4915774
ccttggagt

SEQ ID NO: 195451 - DNA, 9 bp, Unknown
  misc_feature (1)..( 9): Result.006 file - promoters50/4915774
ccttggctt

SEQ ID NO: 195452 - DNA, 8 bp, Unknown
  misc_feature (1)..( 8): Result.006 file - promoters50/4915774
ctctatca

SEQ ID NO: 195453 - DNA, 8 bp, Unknown
  misc_feature (1)..( 8): Result.006 file - promoters50/4915774
ctctttca

SEQ ID NO: 195454 - DNA, 8 bp, Unknown
  misc_feature (1)..( 8): Result.006 file - promoters50/4915804
ggctttca

SEQ ID NO: 195455 - DNA, 11 bp, Unknown
  misc_feature (1)..( 11): Result.006 file - promoters50/4915804
atttactaggt

SEQ ID NO: 195456 - DNA, 11 bp, Unknown
  misc_feature (1)..( 11): Result.006 file - promoters50/4915804
attgactattg

SEQ ID NO: 195457 - DNA, 11 bp, Unknown
  misc_feature (1)..( 11): Result.006 file - promoters50/4915804
tctgaatattg

SEQ ID NO: 195458 - DNA, 7 bp, Unknown
  misc_feature (1)..( 7): Result.006 file - promoters50/4915804
ttacaaa

SEQ ID NO: 195459 - DNA, 7 bp, Unknown
  misc_feature (1)..( 7): Result.006 file - promoters50/4915804
ttataaa

SEQ ID NO: 195460 - DNA, 7 bp, Unknown
  misc_feature (1)..( 7): Result.006 file - promoters50/4915804
atataaa

SEQ ID NO: 195461 - DNA, 8 bp, Unknown
  misc_feature (1)..( 8): Result.006 file - promoters50/4915804
ttatctta

SEQ ID NO: 195462 - DNA, 8 bp, Unknown
  misc_feature (1)..( 8): Result.006 file - promoters50/4915804
atatcttt

SEQ ID NO: 195463 - DNA, 8 bp, Unknown
  misc_feature (1)..( 8): Result.006 file - promoters50/4915816
atatgttt

SEQ ID NO: 195464 - DNA, 14 bp, Unknown
  misc_feature (1)..( 14): Result.006 file - promoters50/4915816
cgaatttgtttgag

SEQ ID NO: 195465 - DNA, 14 bp, Unknown
  misc_feature (1)..( 14): Result.006 file - promoters50/4915816
tatatttctttaaa

SEQ ID NO: 195466 - DNA, 14 bp, Unknown
  misc_feature (1)..( 14): Result.006 file - promoters50/4915816
gatgtttctttgtc

SEQ ID NO: 195467 - DNA, 14 bp, Unknown
  misc_feature (1)..( 14): Result.006 file - promoters50/4915816
gaaattgaaagaga

SEQ ID NO: 195468 - DNA, 14 bp, Unknown
  misc_feature (1)..( 14): Result.006 file - promoters50/4915816
agtttttattttta

SEQ ID NO: 195469 - DNA, 14 bp, Unknown
  misc_feature (1)..( 14): Result.006 file - promoters50/4915819
atcaaatcttcaaa

SEQ ID NO: 195470 - DNA, 10 bp, Unknown
  misc_feature (1)..( 10): Result.006 file - promoters50/4915819
aaatttaaga

SEQ ID NO: 195471 - DNA, 10 bp, Unknown
  misc_feature (1)..( 10): Result.006 file - promoters50/4915819
gaatctaatt

SEQ ID NO: 195472 - DNA, 10 bp, Unknown
  misc_feature (1)..( 10): Result.006 file - promoters50/4915819
aaattcaagt

SEQ ID NO: 195473 - DNA, 11 bp, Unknown
  misc_feature (1)..( 11): Result.006 file - promoters50/4915819
ttgctttcaga

SEQ ID NO: 195474 - DNA, 10 bp, Unknown
  misc_feature (1)..( 10): Result.006 file - promoters50/4915819
atattcaacg

SEQ ID NO: 195475 - DNA, 11 bp, Unknown
  misc_feature (1)..( 11): Result.006 file - promoters50/4921122
ttatactcatg

SEQ ID NO: 195476 - DNA, 15 bp, Unknown
  misc_feature (1)..( 15): Result.006 file - promoters50/4921122
gtgttataatttttt

SEQ ID NO: 195477 - DNA, 15 bp, Unknown
  misc_feature (1)..( 15): Result.006 file - promoters50/4921122
gggttacaatttttt

SEQ ID NO: 195478 - DNA, 15 bp, Unknown
  misc_feature (1)..( 15): Result.006 file - promoters50/4921122
tcgttatgatttctt

SEQ ID NO: 195479 - DNA, 15 bp, Unknown
  misc_feature (1)..( 15): Result.006 file - promoters50/4921122
ctcttactattgaag

SEQ ID NO: 195480 - DNA, 15 bp, Unknown
  misc_feature (1)..( 15): Result.006 file - promoters50/4921373
tcgctattccaccat

SEQ ID NO: 195481 - DNA, 7 bp, Unknown
  misc_feature (1)..( 7): Result.006 file - promoters50/4921373
gattata

SEQ ID NO: 195482 - DNA, 7 bp, Unknown
  misc_feature (1)..( 7): Result.006 file - promoters50/4921373
aattata

SEQ ID NO: 195483 - DNA, 7 bp, Unknown
  misc_feature (1)..( 7): Result.006 file - promoters50/4921373
gattata

SEQ ID NO: 195484 - DNA, 7 bp, Unknown
  misc_feature (1)..( 7): Result.006 file - promoters50/4921373
aataata

SEQ ID NO: 195485 - DNA, 10 bp, Unknown
  misc_feature (1)..( 10): Result.006 file - promoters50/4921373
aaagattata

SEQ ID NO: 195486 - DNA, 10 bp, Unknown
  misc_feature (1)..( 10): Result.006 file - promoters50/4921373
aaagcttaga

SEQ ID NO: 195487 - DNA, 10 bp, Unknown
  misc_feature (1)..( 10): Result.006 file - promoters50/4921373
tttgattata

SEQ ID NO: 195488 - DNA, 10 bp, Unknown
  misc_feature (1)..( 10): Result.006 file - promoters50/4921373
caagatttgt

SEQ ID NO: 195489 - DNA, 11 bp, Unknown
  misc_feature (1)..( 11): Result.006 file - promoters50/4921373
aagttaatttc

SEQ ID NO: 195490 - DNA, 11 bp, Unknown
  misc_feature (1)..( 11): Result.006 file - promoters50/4921373
gagttgattat

SEQ ID NO: 195491 - DNA, 11 bp, Unknown
  misc_feature (1)..( 11): Result.006 file - promoters50/4921373
gagttgtgtgg

SEQ ID NO: 195492 - DNA, 11 bp, Unknown
  misc_feature (1)..( 11): Result.006 file - promoters50/4921433
acagtgatttg

SEQ ID NO: 195493 - DNA, 12 bp, Unknown
  misc_feature (1)..( 12): Result.006 file - promoters50/4921433
tttgatttgagt

SEQ ID NO: 195494 - DNA, 12 bp, Unknown
  misc_feature (1)..( 12): Result.006 file - promoters50/4921433
aatgatgtgatg

SEQ ID NO: 195495 - DNA, 12 bp, Unknown
  misc_feature (1)..( 12): Result.006 file - promoters50/4921433
tttgttttgtag

SEQ ID NO: 195496 - DNA, 12 bp, Unknown
  misc_feature (1)..( 12): Result.006 file - promoters50/4921433
aaaagtttgagc

SEQ ID NO: 195497 - DNA, 12 bp, Unknown
  misc_feature (1)..( 12): Result.006 file - promoters50/4921433
tttgtttttttt

SEQ ID NO: 195498 - DNA, 12 bp, Unknown
  misc_feature (1)..( 12): Result.006 file - promoters50/4921433
taagatttagta

SEQ ID NO: 195499 - DNA, 16 bp, Unknown
  misc_feature (1)..( 16): Result.006 file - promoters50/4921433
cgagaattttgggaat

SEQ ID NO: 195500 - DNA, 16 bp, Unknown
  misc_feature (1)..( 16): Result.006 file - promoters50/4921433
gatgaatttaaagctt

SEQ ID NO: 195501 - DNA, 16 bp, Unknown
  misc_feature (1)..( 16): Result.006 file - promoters50/4921433
aaacaattttgctaca

SEQ ID NO: 195502 - DNA, 16 bp, Unknown
  misc_feature (1)..( 16): Result.006 file - promoters50/4921433
gataaattacggccat

SEQ ID NO: 195503 - DNA, 16 bp, Unknown
  misc_feature (1)..( 16): Result.006 file - promoters50/4921433
taaaaattgaaacttt

SEQ ID NO: 195504 - DNA, 16 bp, Unknown
  misc_feature (1)..( 16): Result.006 file - promoters50/4921447
tccatattaaaaatga

SEQ ID NO: 195505 - DNA, 14 bp, Unknown
  misc_feature (1)..( 14): Result.006 file - promoters50/4921447
ttgagttaacagtt

SEQ ID NO: 195506 - DNA, 14 bp, Unknown
  misc_feature (1)..( 14): Result.006 file - promoters50/4921447
tttttttaacaaga

SEQ ID NO: 195507 - DNA, 14 bp, Unknown
  misc_feature (1)..( 14): Result.006 file - promoters50/4921447
tgaacctaacagat

SEQ ID NO: 195508 - DNA, 13 bp, Unknown
  misc_feature (1)..( 13): Result.006 file - promoters50/4921447
agtactaacaaga

SEQ ID NO: 195509 - DNA, 14 bp, Unknown
  misc_feature (1)..( 14): Result.006 file - promoters50/4921447
aagctttaaccccc

SEQ ID NO: 195510 - DNA, 14 bp, Unknown
  misc_feature (1)..( 14): Result.006 file - promoters50/4921447
tgtatttgacagac

SEQ ID NO: 195511 - DNA, 14 bp, Unknown
  misc_feature (1)..( 14): Result.006 file - promoters50/4921447
tcggttttaccacg

SEQ ID NO: 195512 - DNA, 14 bp, Unknown
  misc_feature (1)..( 14): Result.006 file - promoters50/4921447
aagttttaaggtga

SEQ ID NO: 195513 - DNA, 12 bp, Unknown
  misc_feature (1)..( 12): Result.006 file - promoters50/4921447
cttgaaaaagag

SEQ ID NO: 195514 - DNA, 12 bp, Unknown
  misc_feature (1)..( 12): Result.006 file - promoters50/4921447
ttggtgaaagag

SEQ ID NO: 195515 - DNA, 12 bp, Unknown
  misc_feature (1)..( 12): Result.006 file - promoters50/4921447
gtataaaaagaa

SEQ ID NO: 195516 - DNA, 12 bp, Unknown
  misc_feature (1)..( 12): Result.006 file - promoters50/4921447
ttgatgaatgag

SEQ ID NO: 195517 - DNA, 12 bp, Unknown
  misc_feature (1)..( 12): Result.006 file - promoters50/4921447
acgatgaaatcg

SEQ ID NO: 195518 - DNA, 12 bp, Unknown
  misc_feature (1)..( 12): Result.006 file - promoters50/4921447
tatatcaaaatt

SEQ ID NO: 195519 - DNA, 12 bp, Unknown
  misc_feature (1)..( 12): Result.006 file - promoters50/4921447
tcgatgatactt

SEQ ID NO: 195520 - DNA, 14 bp, Unknown
  misc_feature (1)..( 14): Result.006 file - promoters50/4921447
gaaagatgaacatg

SEQ ID NO: 195521 - DNA, 14 bp, Unknown
  misc_feature (1)..( 14): Result.006 file - promoters50/4921447
tgttgatgaatgag

SEQ ID NO: 195522 - DNA, 14 bp, Unknown
  misc_feature (1)..( 14): Result.006 file - promoters50/4921447
tgacgatgaaatcg

SEQ ID NO: 195523 - DNA, 14 bp, Unknown
  misc_feature (1)..( 14): Result.006 file - promoters50/4921447
ttttggtgaaagag

SEQ ID NO: 195524 - DNA, 14 bp, Unknown
  misc_feature (1)..( 14): Result.006 file - promoters50/4921447
ttttggtcttaatc

SEQ ID NO: 195525 - DNA, 14 bp, Unknown
  misc_feature (1)..( 14): Result.006 file - promoters50/4921447
aatcgatgatactt

SEQ ID NO: 195526 - DNA, 9 bp, Unknown
  misc_feature (1)..( 9): Result.006 file - promoters50/4921447
agattaaag

SEQ ID NO: 195527 - DNA, 9 bp, Unknown
  misc_feature (1)..( 9): Result.006 file - promoters50/4921447
tgattaacg

SEQ ID NO: 195528 - DNA, 9 bp, Unknown
  misc_feature (1)..( 9): Result.006 file - promoters50/4921447
atattaaag

SEQ ID NO: 195529 - DNA, 9 bp, Unknown
  misc_feature (1)..( 9): Result.006 file - promoters50/4921447
aaattaaac

SEQ ID NO: 195530 - DNA, 9 bp, Unknown
  misc_feature (1)..( 9): Result.006 file - promoters50/4921447
atatcaaaa

SEQ ID NO: 195531 - DNA, 9 bp, Unknown
  misc_feature (1)..( 9): Result.006 file - promoters50/4922491
gtataaaaa

SEQ ID NO: 195532 - DNA, 10 bp, Unknown
  misc_feature (1)..( 10): Result.006 file - promoters50/4922491
aacatcatct

SEQ ID NO: 195533 - DNA, 10 bp, Unknown
  misc_feature (1)..( 10): Result.006 file - promoters50/4922491
aaaatcttct

SEQ ID NO: 195534 - DNA, 10 bp, Unknown
  misc_feature (1)..( 10): Result.006 file - promoters50/4934904
aaagtcttta

SEQ ID NO: 195535 - DNA, 13 bp, Unknown
  misc_feature (1)..( 13): Result.006 file - promoters50/4934904
tctgggaaatcgg

SEQ ID NO: 195536 - DNA, 13 bp, Unknown
  misc_feature (1)..( 13): Result.006 file - promoters50/4934904
tctggggaatcgg

SEQ ID NO: 195537 - DNA, 13 bp, Unknown
  misc_feature (1)..( 13): Result.006 file - promoters50/4934904
atgcggaaattaa

SEQ ID NO: 195538 - DNA, 6 bp, Unknown
  misc_feature (1)..( 6): Result.006 file - promoters50/4934904
tttcaa

SEQ ID NO: 195539 - DNA, 6 bp, Unknown
  misc_feature (1)..( 6): Result.006 file - promoters50/4934904
tttcaa

SEQ ID NO: 195540 - DNA, 6 bp, Unknown
  misc_feature (1)..( 6): Result.006 file - promoters50/4934904
tttcaa

SEQ ID NO: 195541 - DNA, 8 bp, Unknown
  misc_feature (1)..( 8): Result.006 file - promoters50/4934904
gtatctca

SEQ ID NO: 195542 - DNA, 8 bp, Unknown
  misc_feature (1)..( 8): Result.006 file - promoters50/4934904
acatctca

SEQ ID NO: 195543 - DNA, 8 bp, Unknown
  misc_feature (1)..( 8): Result.006 file - promoters50/4934904
acagctct

SEQ ID NO: 195544 - DNA, 7 bp, Unknown
  misc_feature (1)..( 7): Result.006 file - promoters50/4934904
ttctctg

SEQ ID NO: 195545 - DNA, 7 bp, Unknown
  misc_feature (1)..( 7): Result.006 file - promoters50/4934904
ttctctc

SEQ ID NO: 195546 - DNA, 7 bp, Unknown
  misc_feature (1)..( 7): Result.006 file - promoters50/4934904
ctctctc

SEQ ID NO: 195547 - DNA, 8 bp, Unknown
  misc_feature (1)..( 8): Result.006 file - promoters50/4934904
cagctctc

SEQ ID NO: 195548 - DNA, 8 bp, Unknown
  misc_feature (1)..( 8): Result.006 file - promoters50/4934904
gagctctc

SEQ ID NO: 195549 - DNA, 8 bp, Unknown
  misc_feature (1)..( 8): Result.006 file - promoters50/4938731
gagctccg

SEQ ID NO: 195550 - DNA, 18 bp, Unknown
  misc_feature (1)..( 18): Result.006 file - promoters50/4938731
aaacaaaaaaaatagaca

SEQ ID NO: 195551 - DNA, 18 bp, Unknown
  misc_feature (1)..( 18): Result.006 file - promoters50/4938731
ttgatgatcaaatagcat

SEQ ID NO: 195552 - DNA, 18 bp, Unknown
  misc_feature (1)..( 18): Result.006 file - promoters50/4938731
tataaccaaaaataatag

SEQ ID NO: 195553 - DNA, 18 bp, Unknown
  misc_feature (1)..( 18): Result.006 file - promoters50/4938731
actttatgaaaacagacg

SEQ ID NO: 195554 - DNA, 18 bp, Unknown
  misc_feature (1)..( 18): Result.006 file - promoters50/4938731
tcttggaagcaatagctg

SEQ ID NO: 195555 - DNA, 18 bp, Unknown
  misc_feature (1)..( 18): Result.006 file - promoters50/4938731
tataacccaaaattgacc

SEQ ID NO: 195556 - DNA, 18 bp, Unknown
  misc_feature (1)..( 18): Result.006 file - promoters50/4938731
tgagtttcgaaataaatg

SEQ ID NO: 195557 - DNA, 11 bp, Unknown
  misc_feature (1)..( 11): Result.006 file - promoters50/4938731
taaattatgag

SEQ ID NO: 195558 - DNA, 11 bp, Unknown
  misc_feature (1)..( 11): Result.006 file - promoters50/4938731
taaattaacaa

SEQ ID NO: 195559 - DNA, 11 bp, Unknown
  misc_feature (1)..( 11): Result.006 file - promoters50/4938731
taaatttaaaa

SEQ ID NO: 195560 - DNA, 11 bp, Unknown
  misc_feature (1)..( 11): Result.006 file - promoters50/4938731
tgaattaccaa

SEQ ID NO: 195561 - DNA, 11 bp, Unknown
  misc_feature (1)..( 11): Result.006 file - promoters50/4938731
ctaattaacct

SEQ ID NO: 195562 - DNA, 11 bp, Unknown
  misc_feature (1)..( 11): Result.006 file - promoters50/4938731
taaatttatta

SEQ ID NO: 195563 - DNA, 16 bp, Unknown
  misc_feature (1)..( 16): Result.006 file - promoters50/4938731
acttattccattaaac

SEQ ID NO: 195564 - DNA, 16 bp, Unknown
  misc_feature (1)..( 16): Result.006 file - promoters50/4938731
ttttatttcattaaat

SEQ ID NO: 195565 - DNA, 16 bp, Unknown
  misc_feature (1)..( 16): Result.006 file - promoters50/4938731
gctcggtacatgaaag

SEQ ID NO: 195566 - DNA, 16 bp, Unknown
  misc_feature (1)..( 16): Result.006 file - promoters50/4938731
actgatttttcattaa

SEQ ID NO: 195567 - DNA, 16 bp, Unknown
  misc_feature (1)..( 16): Result.006 file - promoters50/4938731
atttactctgttaaac

SEQ ID NO: 195568 - DNA, 16 bp, Unknown
  misc_feature (1)..( 16): Result.006 file - promoters50/4943425
atgtttttgattcagg

SEQ ID NO: 195569 - DNA, 11 bp, Unknown
  misc_feature (1)..( 11): Result.006 file - promoters50/4943425
ggtttattcat

SEQ ID NO: 195570 - DNA, 11 bp, Unknown
  misc_feature (1)..( 11): Result.006 file - promoters50/4943425
agtttattatt

SEQ ID NO: 195571 - DNA, 11 bp, Unknown
  misc_feature (1)..( 11): Result.006 file - promoters50/4943425
ggtttattttt

SEQ ID NO: 195572 - DNA, 11 bp, Unknown
  misc_feature (1)..( 11): Result.006 file - promoters50/4943425
tttttgttcat

SEQ ID NO: 195573 - DNA, 11 bp, Unknown
  misc_feature (1)..( 11): Result.006 file - promoters50/4943425
attttatttta

SEQ ID NO: 195574 - DNA, 14 bp, Unknown
  misc_feature (1)..( 14): Result.006 file - promoters50/4943425
ttgtgtttttattt

SEQ ID NO: 195575 - DNA, 14 bp, Unknown
  misc_feature (1)..( 14): Result.006 file - promoters50/4943425
cgacaatttgattc

SEQ ID NO: 195576 - DNA, 14 bp, Unknown
  misc_feature (1)..( 14): Result.006 file - promoters50/4943425
ttttttttttatat

SEQ ID NO: 195577 - DNA, 14 bp, Unknown
  misc_feature (1)..( 14): Result.006 file - promoters50/4943425
tgatgttttaattt

SEQ ID NO: 195578 - DNA, 14 bp, Unknown
  misc_feature (1)..( 14): Result.006 file - promoters50/4943425
tgtagttttcattt

SEQ ID NO: 195579 - DNA, 16 bp, Unknown
  misc_feature (1)..( 16): Result.006 file - promoters50/4943425
attctattaagccatt

SEQ ID NO: 195580 - DNA, 16 bp, Unknown
  misc_feature (1)..( 16): Result.006 file - promoters50/4943425
attttataaagatcct

SEQ ID NO: 195581 - DNA, 16 bp, Unknown
  misc_feature (1)..( 16): Result.006 file - promoters50/4943425
gtagtataaatatcct

SEQ ID NO: 195582 - DNA, 16 bp, Unknown
  misc_feature (1)..( 16): Result.006 file - promoters50/4943425
tttgtataaaatccca

SEQ ID NO: 195583 - DNA, 16 bp, Unknown
  misc_feature (1)..( 16): Result.006 file - promoters50/4943637
acaacataaagcttga

SEQ ID NO: 195584 - DNA, 13 bp, Unknown
  misc_feature (1)..( 13): Result.006 file - promoters50/4943637
tttagtttgttct

SEQ ID NO: 195585 - DNA, 14 bp, Unknown
  misc_feature (1)..( 14): Result.006 file - promoters50/4943637
tattagtttggtct

SEQ ID NO: 195586 - DNA, 14 bp, Unknown
  misc_feature (1)..( 14): Result.006 file - promoters50/4943637
cagaggtttgtacc

SEQ ID NO: 195587 - DNA, 14 bp, Unknown
  misc_feature (1)..( 14): Result.006 file - promoters50/4943637
tatgagtataacaa

SEQ ID NO: 195588 - DNA, 8 bp, Unknown
  misc_feature (1)..( 8): Result.006 file - promoters50/4943637
tgagaaaa

SEQ ID NO: 195589 - DNA, 8 bp, Unknown
  misc_feature (1)..( 8): Result.006 file - promoters50/4943637
tgagaaag

SEQ ID NO: 195590 - DNA, 8 bp, Unknown
  misc_feature (1)..( 8): Result.006 file - promoters50/4943637
caagaaaa

SEQ ID NO: 195591 - DNA, 8 bp, Unknown
  misc_feature (1)..( 8): Result.006 file - promoters50/4974495
aaagaaag

SEQ ID NO: 195592 - DNA, 11 bp, Unknown
  misc_feature (1)..( 11): Result.006 file - promoters50/4974495
ttaagatttct

SEQ ID NO: 195593 - DNA, 11 bp, Unknown
  misc_feature (1)..( 11): Result.006 file - promoters50/4974495
ttaggatgcag

SEQ ID NO: 195594 - DNA, 11 bp, Unknown
  misc_feature (1)..( 11): Result.006 file - promoters50/4978201
cgaggaagcag

SEQ ID NO: 195595 - DNA, 13 bp, Unknown
  misc_feature (1)..( 13): Result.006 file - promoters50/4978201
tatgcttgcttaa

SEQ ID NO: 195596 - DNA, 13 bp, Unknown
  misc_feature (1)..( 13): Result.006 file - promoters50/4978201
gatgtttgattaa

SEQ ID NO: 195597 - DNA, 13 bp, Unknown
  misc_feature (1)..( 13): Result.006 file - promoters50/4978201
gtctcttgctgct

SEQ ID NO: 195598 - DNA, 13 bp, Unknown
  misc_feature (1)..( 13): Result.006 file - promoters50/4978201
actgcttgtatcc

SEQ ID NO: 195599 - DNA, 13 bp, Unknown
  misc_feature (1)..( 13): Result.006 file - promoters50/4978201
agagttggatagc

SEQ ID NO: 195600 - DNA, 13 bp, Unknown
  misc_feature (1)..( 13): Result.006 file - promoters50/4978201
acttcttagtacg

SEQ ID NO: 195601 - DNA, 16 bp, Unknown
  misc_feature (1)..( 16): Result.006 file - promoters50/4978201
aattcaaaaagcaaaa

SEQ ID NO: 195602 - DNA, 16 bp, Unknown
  misc_feature (1)..( 16): Result.006 file - promoters50/4978201
tgttcaaaaaaatatt

SEQ ID NO: 195603 - DNA, 16 bp, Unknown
  misc_feature (1)..( 16): Result.006 file - promoters50/4978201
aattccaaattttgaa

SEQ ID NO: 195604 - DNA, 16 bp, Unknown
  misc_feature (1)..( 16): Result.006 file - promoters50/4978201
aaaaaaaaaaggaaaa

SEQ ID NO: 195605 - DNA, 16 bp, Unknown
  misc_feature (1)..( 16): Result.006 file - promoters50/4978201
tattcaactatacata

SEQ ID NO: 195606 - DNA, 16 bp, Unknown
  misc_feature (1)..( 16): Result.006 file - promoters50/4992383
aaagccatatttgggc

SEQ ID NO: 195607 - DNA, 10 bp, Unknown
  misc_feature (1)..( 10): Result.006 file - promoters50/4992383
tttgtataaa

SEQ ID NO: 195608 - DNA, 10 bp, Unknown
  misc_feature (1)..( 10): Result.006 file - promoters50/4992383
ataatataaa

SEQ ID NO: 195609 - DNA, 10 bp, Unknown
  misc_feature (1)..( 10): Result.006 file - promoters50/4992383
tttgtttaag

SEQ ID NO: 195610 - DNA, 10 bp, Unknown
  misc_feature (1)..( 10): Result.006 file - promoters50/4992383
cacttttaga

SEQ ID NO: 195611 - DNA, 9 bp, Unknown
  misc_feature (1)..( 9): Result.006 file - promoters50/4992383
tttgctttg

SEQ ID NO: 195612 - DNA, 9 bp, Unknown
  misc_feature (1)..( 9): Result.006 file - promoters50/4992383
tttgatttg

SEQ ID NO: 195613 - DNA, 10 bp, Unknown
  misc_feature (1)..( 10): Result.006 file - promoters50/4992383
tttcgatgta

SEQ ID NO: 195614 - DNA, 10 bp, Unknown
  misc_feature (1)..( 10): Result.006 file - promoters50/4992383
ttttgatttg

SEQ ID NO: 195615 - DNA, 10 bp, Unknown
  misc_feature (1)..( 10): Result.006 file - promoters50/4992383
atttcattta

SEQ ID NO: 195616 - DNA, 12 bp, Unknown
  misc_feature (1)..( 12): Result.006 file - promoters50/4992383
tgttttgttttc

SEQ ID NO: 195617 - DNA, 12 bp, Unknown
  misc_feature (1)..( 12): Result.006 file - promoters50/4992383
tgttttctttta

SEQ ID NO: 195618 - DNA, 12 bp, Unknown
  misc_feature (1)..( 12): Result.006 file - promoters50/4992383
gcttttgatttg

SEQ ID NO: 195619 - DNA, 12 bp, Unknown
  misc_feature (1)..( 12): Result.006 file - promoters50/4992383
tatttcgatgta

SEQ ID NO: 195620 - DNA, 12 bp, Unknown
  misc_feature (1)..( 12): Result.006 file - promoters50/4992383
atatttcattta

SEQ ID NO: 195621 - DNA, 9 bp, Unknown
  misc_feature (1)..( 9): Result.006 file - promoters50/4992383
ttgtctatg

SEQ ID NO: 195622 - DNA, 9 bp, Unknown
  misc_feature (1)..( 9): Result.006 file - promoters50/4992383
gtttctatg

SEQ ID NO: 195623 - DNA, 9 bp, Unknown
  misc_feature (1)..( 9): Result.006 file - promoters50/4992383
atttttatt

SEQ ID NO: 195624 - DNA, 9 bp, Unknown
  misc_feature (1)..( 9): Result.006 file - promoters50/4992383
ttttctttt

SEQ ID NO: 195625 - DNA, 14 bp, Unknown
  misc_feature (1)..( 14): Result.006 file - promoters50/4992383
aacctttatgtact

SEQ ID NO: 195626 - DNA, 14 bp, Unknown
  misc_feature (1)..( 14): Result.006 file - promoters50/4992383
aacttttaagtaaa

SEQ ID NO: 195627 - DNA, 14 bp, Unknown
  misc_feature (1)..( 14): Result.006 file - promoters50/4992383
ttattttcagtaga

SEQ ID NO: 195628 - DNA, 14 bp, Unknown
  misc_feature (1)..( 14): Result.006 file - promoters50/4992383
accagaccagaaga

SEQ ID NO: 195629 - DNA, 12 bp, Unknown
  misc_feature (1)..( 12): Result.006 file - promoters50/4992383
ttttaactaaca

SEQ ID NO: 195630 - DNA, 12 bp, Unknown
  misc_feature (1)..( 12): Result.006 file - promoters50/4992383
aaccaactaaca

SEQ ID NO: 195631 - DNA, 12 bp, Unknown
  misc_feature (1)..( 12): Result.006 file - promoters50/4992383
ttttcactaatg

SEQ ID NO: 195632 - DNA, 12 bp, Unknown
  misc_feature (1)..( 12): Result.006 file - promoters50/4992383
ttttcaccatca

SEQ ID NO: 195633 - DNA, 13 bp, Unknown
  misc_feature (1)..( 13): Result.006 file - promoters50/4992383
atatttgtcctaa

SEQ ID NO: 195634 - DNA, 13 bp, Unknown
  misc_feature (1)..( 13): Result.006 file - promoters50/4992383
atatttagtttat

SEQ ID NO: 195635 - DNA, 13 bp, Unknown
  misc_feature (1)..( 13): Result.006 file - promoters50/4992383
ctatttttatttt

SEQ ID NO: 195636 - DNA, 13 bp, Unknown
  misc_feature (1)..( 13): Result.006 file - promoters50/4992383
tgtgttttctttt

SEQ ID NO: 195637 - DNA, 9 bp, Unknown
  misc_feature (1)..( 9): Result.006 file - promoters50/4992383
aatttattt

SEQ ID NO: 195638 - DNA, 9 bp, Unknown
  misc_feature (1)..( 9): Result.006 file - promoters50/4992383
agtttattc

SEQ ID NO: 195639 - DNA, 9 bp, Unknown
  misc_feature (1)..( 9): Result.006 file - promoters50/4992383
aatatattt

SEQ ID NO: 195640 - DNA, 9 bp, Unknown
  misc_feature (1)..( 9): Result.006 file - promoters50/4992383
tttttattt

SEQ ID NO: 195641 - DNA, 7 bp, Unknown
  misc_feature (1)..( 7): Result.006 file - promoters50/4992383
aatattt

SEQ ID NO: 195642 - DNA, 7 bp, Unknown
  misc_feature (1)..( 7): Result.006 file - promoters50/4992383
aatgttt

SEQ ID NO: 195643 - DNA, 7 bp, Unknown
  misc_feature (1)..( 7): Result.006 file - promoters50/4992383
aatgttt

SEQ ID NO: 195644 - DNA, 7 bp, Unknown
  misc_feature (1)..( 7): Result.006 file - promoters50/4992383
aatgttt

SEQ ID NO: 195645 - DNA, 13 bp, Unknown
  misc_feature (1)..( 13): Result.006 file - promoters50/4992383
aattatttctaat

SEQ ID NO: 195646 - DNA, 13 bp, Unknown
  misc_feature (1)..( 13): Result.006 file - promoters50/4992383
ttttatttttatc

SEQ ID NO: 195647 - DNA, 13 bp, Unknown
  misc_feature (1)..( 13): Result.006 file - promoters50/4992383
atatatttagttt

SEQ ID NO: 195648 - DNA, 13 bp, Unknown
  misc_feature (1)..( 13): Result.006 file - promoters50/4992452
ttttcttttaatt

SEQ ID NO: 195649 - DNA, 11 bp, Unknown
  misc_feature (1)..( 11): Result.006 file - promoters50/4992452
gattttaccag

SEQ ID NO: 195650 - DNA, 11 bp, Unknown
  misc_feature (1)..( 11): Result.006 file - promoters50/4992452
tattatactaa

SEQ ID NO: 195651 - DNA, 11 bp, Unknown
  misc_feature (1)..( 11): Result.006 file - promoters50/4992452
tataatatcac

SEQ ID NO: 195652 - DNA, 11 bp, Unknown
  misc_feature (1)..( 11): Result.006 file - promoters50/4992452
caatttactat

SEQ ID NO: 195653 - DNA, 10 bp, Unknown
  misc_feature (1)..( 10): Result.006 file - promoters50/4992452
tgttacatcc

SEQ ID NO: 195654 - DNA, 10 bp, Unknown
  misc_feature (1)..( 10): Result.006 file - promoters50/4992452
tgttacaaat

SEQ ID NO: 195655 - DNA, 10 bp, Unknown
  misc_feature (1)..( 10): Result.006 file - promoters50/4992452
gattaaaaat

SEQ ID NO: 195656 - DNA, 10 bp, Unknown
  misc_feature (1)..( 10): Result.006 file - promoters50/4992452
gattataaaa

SEQ ID NO: 195657 - DNA, 13 bp, Unknown
  misc_feature (1)..( 13): Result.006 file - promoters50/4992452
aaatttgttattt

SEQ ID NO: 195658 - DNA, 13 bp, Unknown
  misc_feature (1)..( 13): Result.006 file - promoters50/4992452
aaatctgtatttt

SEQ ID NO: 195659 - DNA, 13 bp, Unknown
  misc_feature (1)..( 13): Result.006 file - promoters50/4992452
aaatttgtaattt

SEQ ID NO: 195660 - DNA, 13 bp, Unknown
  misc_feature (1)..( 13): Result.006 file - promoters50/4992452
aaaactgaactaa

SEQ ID NO: 195661 - DNA, 9 bp, Unknown
  misc_feature (1)..( 9): Result.006 file - promoters50/4992452
taatattat

SEQ ID NO: 195662 - DNA, 9 bp, Unknown
  misc_feature (1)..( 9): Result.006 file - promoters50/4992452
taaaattaa

SEQ ID NO: 195663 - DNA, 9 bp, Unknown
  misc_feature (1)..( 9): Result.006 file - promoters50/4992452
taatcatac

SEQ ID NO: 195664 - DNA, 9 bp, Unknown
  misc_feature (1)..( 9): Result.006 file - promoters50/4992452
aaatattgt

SEQ ID NO: 195665 - DNA, 9 bp, Unknown
  misc_feature (1)..( 9): Result.006 file - promoters50/4992452
taaaattaa

SEQ ID NO: 195666 - DNA, 8 bp, Unknown
  misc_feature (1)..( 8): Result.006 file - promoters50/4992452
tattatta

SEQ ID NO: 195667 - DNA, 8 bp, Unknown
  misc_feature (1)..( 8): Result.006 file - promoters50/4992452
gattttta

SEQ ID NO: 195668 - DNA, 8 bp, Unknown
  misc_feature (1)..( 8): Result.006 file - promoters50/4992452
tattgtta

SEQ ID NO: 195669 - DNA, 8 bp, Unknown
  misc_feature (1)..( 8): Result.006 file - promoters50/4992452
ctttttta

SEQ ID NO: 195670 - DNA, 7 bp, Unknown
  misc_feature (1)..( 7): Result.006 file - promoters50/4992452
attgcat

SEQ ID NO: 195671 - DNA, 7 bp, Unknown
  misc_feature (1)..( 7): Result.006 file - promoters50/4992452
atttcat

SEQ ID NO: 195672 - DNA, 7 bp, Unknown
  misc_feature (1)..( 7): Result.006 file - promoters50/4992452
ttttcat

SEQ ID NO: 195673 - DNA, 7 bp, Unknown
  misc_feature (1)..( 7): Result.006 file - promoters50/5003710
atttcaa

SEQ ID NO: 195674 - DNA, 19 bp, Unknown
  misc_feature (1)..( 19): Result.006 file - promoters50/5003710
tatacaaaatatataatta

SEQ ID NO: 195675 - DNA, 19 bp, Unknown
  misc_feature (1)..( 19): Result.006 file - promoters50/5003710
tattcaaaacataaatcta

SEQ ID NO: 195676 - DNA, 19 bp, Unknown
  misc_feature (1)..( 19): Result.006 file - promoters50/5003710
tcctttaaacattaaattg

SEQ ID NO: 195677 - DNA, 19 bp, Unknown
  misc_feature (1)..( 19): Result.006 file - promoters50/5003710
tatatgaaatataaataaa

SEQ ID NO: 195678 - DNA, 19 bp, Unknown
  misc_feature (1)..( 19): Result.006 file - promoters50/5003710
tttacggtatataattcaa

SEQ ID NO: 195679 - DNA, 19 bp, Unknown
  misc_feature (1)..( 19): Result.006 file - promoters50/5003710
gatatataaacttaatcat

SEQ ID NO: 195680 - DNA, 19 bp, Unknown
  misc_feature (1)..( 19): Result.006 file - promoters50/5003710
cctgccaaaaattgagtta

SEQ ID NO: 195681 - DNA, 11 bp, Unknown
  misc_feature (1)..( 11): Result.006 file - promoters50/5003710
taaaatatggt

SEQ ID NO: 195682 - DNA, 11 bp, Unknown
  misc_feature (1)..( 11): Result.006 file - promoters50/5003710
caaattatcac

SEQ ID NO: 195683 - DNA, 11 bp, Unknown
  misc_feature (1)..( 11): Result.006 file - promoters50/5003710
aaaaatagata

SEQ ID NO: 195684 - DNA, 11 bp, Unknown
  misc_feature (1)..( 11): Result.006 file - promoters50/5003710
taaaagatgat

SEQ ID NO: 195685 - DNA, 11 bp, Unknown
  misc_feature (1)..( 11): Result.006 file - promoters50/5003710
agaaagataca

SEQ ID NO: 195686 - DNA, 11 bp, Unknown
  misc_feature (1)..( 11): Result.006 file - promoters50/5003710
gaaaatatctt

SEQ ID NO: 195687 - DNA, 11 bp, Unknown
  misc_feature (1)..( 11): Result.006 file - promoters50/5003710
taaagaataac

SEQ ID NO: 195688 - DNA, 11 bp, Unknown
  misc_feature (1)..( 11): Result.006 file - promoters50/5003710
aatcagacaca

SEQ ID NO: 195689 - DNA, 13 bp, Unknown
  misc_feature (1)..( 13): Result.006 file - promoters50/5003710
tatactaaataaa

SEQ ID NO: 195690 - DNA, 13 bp, Unknown
  misc_feature (1)..( 13): Result.006 file - promoters50/5003710
gatacaaaatcac

SEQ ID NO: 195691 - DNA, 13 bp, Unknown
  misc_feature (1)..( 13): Result.006 file - promoters50/5003710
aaaactaaagaaa

SEQ ID NO: 195692 - DNA, 13 bp, Unknown
  misc_feature (1)..( 13): Result.006 file - promoters50/5003710
catagaaaaaaac

SEQ ID NO: 195693 - DNA, 13 bp, Unknown
  misc_feature (1)..( 13): Result.006 file - promoters50/5003710
tagacaaaacaac

SEQ ID NO: 195694 - DNA, 13 bp, Unknown
  misc_feature (1)..( 13): Result.006 file - promoters50/5003710
gatgcaaacattt

SEQ ID NO: 195695 - DNA, 12 bp, Unknown
  misc_feature (1)..( 12): Result.006 file - promoters50/5003710
tgatttattaga

SEQ ID NO: 195696 - DNA, 12 bp, Unknown
  misc_feature (1)..( 12): Result.006 file - promoters50/5003710
aattttattttg

SEQ ID NO: 195697 - DNA, 12 bp, Unknown
  misc_feature (1)..( 12): Result.006 file - promoters50/5003710
tgatttattctc

SEQ ID NO: 195698 - DNA, 12 bp, Unknown
  misc_feature (1)..( 12): Result.006 file - promoters50/5003710
atttttcttctc

SEQ ID NO: 195699 - DNA, 10 bp, Unknown
  misc_feature (1)..( 10): Result.006 file - promoters50/5003710
tttcattgta

SEQ ID NO: 195700 - DNA, 13 bp, Unknown
  misc_feature (1)..( 13): Result.006 file - promoters50/5003830
taattttatggac

SEQ ID NO: 195701 - DNA, 9 bp, Unknown
  misc_feature (1)..( 9): Result.006 file - promoters50/5003830
aaaataata

SEQ ID NO: 195702 - DNA, 9 bp, Unknown
  misc_feature (1)..( 9): Result.006 file - promoters50/5003830
aaaagaata

SEQ ID NO: 195703 - DNA, 9 bp, Unknown
  misc_feature (1)..( 9): Result.006 file - promoters50/5003830
taaagaatc

SEQ ID NO: 195704 - DNA, 8 bp, Unknown
  misc_feature (1)..( 8): Result.006 file - promoters50/5003830
caattata

SEQ ID NO: 195705 - DNA, 8 bp, Unknown
  misc_feature (1)..( 8): Result.006 file - promoters50/5003830
gaataata

SEQ ID NO: 195706 - DNA, 8 bp, Unknown
  misc_feature (1)..( 8): Result.006 file - promoters50/5003830
caaatatc

SEQ ID NO: 195707 - DNA, 11 bp, Unknown
  misc_feature (1)..( 11): Result.006 file - promoters50/5003830
tttctcttttt

SEQ ID NO: 195708 - DNA, 11 bp, Unknown
  misc_feature (1)..( 11): Result.006 file - promoters50/5003830
tttcacttttt

SEQ ID NO: 195709 - DNA, 11 bp, Unknown
  misc_feature (1)..( 11): Result.006 file - promoters50/5003830
cttcactccca

SEQ ID NO: 195710 - DNA, 8 bp, Unknown
  misc_feature (1)..( 8): Result.006 file - promoters50/5003830
aagatttt

SEQ ID NO: 195711 - DNA, 8 bp, Unknown
  misc_feature (1)..( 8): Result.006 file - promoters50/5003830
gagaattt

SEQ ID NO: 195712 - DNA, 8 bp, Unknown
  misc_feature (1)..( 8): Result.006 file - promoters50/5662739
gagaatgg

SEQ ID NO: 195713 - DNA, 13 bp, Unknown
  misc_feature (1)..( 13): Result.006 file - promoters50/5662739
ttataaaacaatt

SEQ ID NO: 195714 - DNA, 13 bp, Unknown
  misc_feature (1)..( 13): Result.006 file - promoters50/5662739
agagaaaacaaaa

SEQ ID NO: 195715 - DNA, 13 bp, Unknown
  misc_feature (1)..( 13): Result.006 file - promoters50/5662739
aaaaaaaacattg

SEQ ID NO: 195716 - DNA, 13 bp, Unknown
  misc_feature (1)..( 13): Result.006 file - promoters50/5662739
tacaaaaagaaaa

SEQ ID NO: 195717 - DNA, 13 bp, Unknown
  misc_feature (1)..( 13): Result.006 file - promoters50/5662739
aaggaaaaaaggt

SEQ ID NO: 195718 - DNA, 13 bp, Unknown
  misc_feature (1)..( 13): Result.006 file - promoters50/5662739
acccaaaaaatct

SEQ ID NO: 195719 - DNA, 14 bp, Unknown
  misc_feature (1)..( 14): Result.006 file - promoters50/5662739
taaaaatttacact

SEQ ID NO: 195720 - DNA, 14 bp, Unknown
  misc_feature (1)..( 14): Result.006 file - promoters50/5662739
gaaagattgttagt

SEQ ID NO: 195721 - DNA, 14 bp, Unknown
  misc_feature (1)..( 14): Result.006 file - promoters50/5662739
cttaaattttttaa

SEQ ID NO: 195722 - DNA, 14 bp, Unknown
  misc_feature (1)..( 14): Result.006 file - promoters50/5662739
taaaaaaagatttt

SEQ ID NO: 195723 - DNA, 14 bp, Unknown
  misc_feature (1)..( 14): Result.006 file - promoters50/5662739
tatgtattttttag

SEQ ID NO: 195724 - DNA, 14 bp, Unknown
  misc_feature (1)..( 14): Result.006 file - promoters50/5662739
actttattttatag

SEQ ID NO: 195725 - DNA, 8 bp, Unknown
  misc_feature (1)..( 8): Result.006 file - promoters50/5662739
ttataaaa

SEQ ID NO: 195726 - DNA, 8 bp, Unknown
  misc_feature (1)..( 8): Result.006 file - promoters50/5662739
ttacaaaa

SEQ ID NO: 195727 - DNA, 8 bp, Unknown
  misc_feature (1)..( 8): Result.006 file - promoters50/5662739
ttagaaat

SEQ ID NO: 195728 - DNA, 8 bp, Unknown
  misc_feature (1)..( 8): Result.006 file - promoters50/5662739
ttataaga

SEQ ID NO: 195729 - DNA, 8 bp, Unknown
  misc_feature (1)..( 8): Result.006 file - promoters50/5662739
aaacaaaa

SEQ ID NO: 195730 - DNA, 8 bp, Unknown
  misc_feature (1)..( 8): Result.006 file - promoters50/5662739
ttacaaaa

SEQ ID NO: 195731 - DNA, 9 bp, Unknown
  misc_feature (1)..( 9): Result.006 file - promoters50/5662739
actttaaaa

SEQ ID NO: 195732 - DNA, 9 bp, Unknown
  misc_feature (1)..( 9): Result.006 file - promoters50/5662739
tttttaaag

SEQ ID NO: 195733 - DNA, 10 bp, Unknown
  misc_feature (1)..( 10): Result.006 file - promoters50/5662739
attttataat

SEQ ID NO: 195734 - DNA, 10 bp, Unknown
  misc_feature (1)..( 10): Result.006 file - promoters50/5662739
tctttttaat

SEQ ID NO: 195735 - DNA, 10 bp, Unknown
  misc_feature (1)..( 10): Result.006 file - promoters50/5662739
tagttataac

SEQ ID NO: 195736 - DNA, 10 bp, Unknown
  misc_feature (1)..( 10): Result.006 file - promoters50/5662739
attttatagg

SEQ ID NO: 195737 - DNA, 13 bp, Unknown
  misc_feature (1)..( 13): Result.006 file - promoters50/5662739
taaaaagagaaaa

SEQ ID NO: 195738 - DNA, 13 bp, Unknown
  misc_feature (1)..( 13): Result.006 file - promoters50/5662739
caaaaagaaaaaa

SEQ ID NO: 195739 - DNA, 13 bp, Unknown
  misc_feature (1)..( 13): Result.006 file - promoters50/5662739
gatagagagaagg

SEQ ID NO: 195740 - DNA, 13 bp, Unknown
  misc_feature (1)..( 13): Result.006 file - promoters50/5662739
taaaaattgggtt

SEQ ID NO: 195741 - DNA, 13 bp, Unknown
  misc_feature (1)..( 13): Result.006 file - promoters50/5662739
taagaagaaaaaa

SEQ ID NO: 195742 - DNA, 13 bp, Unknown
  misc_feature (1)..( 13): Result.006 file - promoters50/5662743
tttacccaaaaaa

SEQ ID NO: 195743 - DNA, 10 bp, Unknown
  misc_feature (1)..( 10): Result.006 file - promoters50/5662743
aataagttaa

SEQ ID NO: 195744 - DNA, 10 bp, Unknown
  misc_feature (1)..( 10): Result.006 file - promoters50/5662743
gataagttct

SEQ ID NO: 195745 - DNA, 10 bp, Unknown
  misc_feature (1)..( 10): Result.006 file - promoters50/5662743
cttaagttag

SEQ ID NO: 195746 - DNA, 10 bp, Unknown
  misc_feature (1)..( 10): Result.006 file - promoters50/5662743
attaatttct

SEQ ID NO: 195747 - DNA, 10 bp, Unknown
  misc_feature (1)..( 10): Result.006 file - promoters50/5662743
cttatgtttg

SEQ ID NO: 195748 - DNA, 10 bp, Unknown
  misc_feature (1)..( 10): Result.006 file - promoters50/5662743
attatgtggg

SEQ ID NO: 195749 - DNA, 13 bp, Unknown
  misc_feature (1)..( 13): Result.006 file - promoters50/5662743
atttgagttttta

SEQ ID NO: 195750 - DNA, 13 bp, Unknown
  misc_feature (1)..( 13): Result.006 file - promoters50/5662743
agattctttttta

SEQ ID NO: 195751 - DNA, 13 bp, Unknown
  misc_feature (1)..( 13): Result.006 file - promoters50/5662743
atttgaatttttg

SEQ ID NO: 195752 - DNA, 14 bp, Unknown
  misc_feature (1)..( 14): Result.006 file - promoters50/5662743
tatttgttttctta

SEQ ID NO: 195753 - DNA, 14 bp, Unknown
  misc_feature (1)..( 14): Result.006 file - promoters50/5662743
aattaatcttttta

SEQ ID NO: 195754 - DNA, 14 bp, Unknown
  misc_feature (1)..( 14): Result.006 file - promoters50/5662743
tctataatttgata

SEQ ID NO: 195755 - DNA, 10 bp, Unknown
  misc_feature (1)..( 10): Result.006 file - promoters50/5662743
tattatttag

SEQ ID NO: 195756 - DNA, 10 bp, Unknown
  misc_feature (1)..( 10): Result.006 file - promoters50/5662743
gattcttttt

SEQ ID NO: 195757 - DNA, 10 bp, Unknown
  misc_feature (1)..( 10): Result.006 file - promoters50/5662743
tattatctaa

SEQ ID NO: 195758 - DNA, 10 bp, Unknown
  misc_feature (1)..( 10): Result.006 file - promoters50/5662743
tattcttttc

SEQ ID NO: 195759 - DNA, 10 bp, Unknown
  misc_feature (1)..( 10): Result.006 file - promoters50/5662743
taatcttttt

SEQ ID NO: 195760 - DNA, 10 bp, Unknown
  misc_feature (1)..( 10): Result.006 file - promoters50/5662743
tatgcttgta

SEQ ID NO: 195761 - DNA, 13 bp, Unknown
  misc_feature (1)..( 13): Result.006 file - promoters50/5662743
gatttgagttttt

SEQ ID NO: 195762 - DNA, 13 bp, Unknown
  misc_feature (1)..( 13): Result.006 file - promoters50/5662743
aatttgatatgct

SEQ ID NO: 195763 - DNA, 13 bp, Unknown
  misc_feature (1)..( 13): Result.006 file - promoters50/5662743
catttgaattttt

SEQ ID NO: 195764 - DNA, 13 bp, Unknown
  misc_feature (1)..( 13): Result.006 file - promoters50/5662743
gattagattcttt

SEQ ID NO: 195765 - DNA, 13 bp, Unknown
  misc_feature (1)..( 13): Result.006 file - promoters50/5662743
tttttgggtattt

SEQ ID NO: 195766 - DNA, 13 bp, Unknown
  misc_feature (1)..( 13): Result.006 file - promoters50/5662743
aaattgaatgtgt

SEQ ID NO: 195767 - DNA, 14 bp, Unknown
  misc_feature (1)..( 14): Result.006 file - promoters50/5662743
tttatttgttaaac

SEQ ID NO: 195768 - DNA, 14 bp, Unknown
  misc_feature (1)..( 14): Result.006 file - promoters50/5662743
tttttttggtggac

SEQ ID NO: 195769 - DNA, 14 bp, Unknown
  misc_feature (1)..( 14): Result.006 file - promoters50/5662743
actatttgataaaa

SEQ ID NO: 195770 - DNA, 14 bp, Unknown
  misc_feature (1)..( 14): Result.006 file - promoters50/5662743
attttctggttttt

SEQ ID NO: 195771 - DNA, 14 bp, Unknown
  misc_feature (1)..( 14): Result.006 file - promoters50/5662743
cttttctcaagcat

SEQ ID NO: 195772 - DNA, 14 bp, Unknown
  misc_feature (1)..( 14): Result.006 file - promoters50/5662743
taaatatgataaaa

SEQ ID NO: 195773 - DNA, 10 bp, Unknown
  misc_feature (1)..( 10): Result.006 file - promoters50/5662743
ccaagattta

SEQ ID NO: 195774 - DNA, 10 bp, Unknown
  misc_feature (1)..( 10): Result.006 file - promoters50/5662743
aacagatttc

SEQ ID NO: 195775 - DNA, 10 bp, Unknown
  misc_feature (1)..( 10): Result.006 file - promoters50/5662743
acaaaatttt

SEQ ID NO: 195776 - DNA, 10 bp, Unknown
  misc_feature (1)..( 10): Result.006 file - promoters50/5662743
tgaagattta

SEQ ID NO: 195777 - DNA, 10 bp, Unknown
  misc_feature (1)..( 10): Result.006 file - promoters50/5662743
ctatgatttc

SEQ ID NO: 195778 - DNA, 10 bp, Unknown
  misc_feature (1)..( 10): Result.006 file - promoters50/5662749
acacaatttt

SEQ ID NO: 195779 - DNA, 10 bp, Unknown
  misc_feature (1)..( 10): Result.006 file - promoters50/5662749
gaaaatgatc

SEQ ID NO: 195780 - DNA, 10 bp, Unknown
  misc_feature (1)..( 10): Result.006 file - promoters50/5662749
taaaatgcga

SEQ ID NO: 195781 - DNA, 10 bp, Unknown
  misc_feature (1)..( 10): Result.006 file - promoters50/5662749
taaaataatc

SEQ ID NO: 195782 - DNA, 10 bp, Unknown
  misc_feature (1)..( 10): Result.006 file - promoters50/5662749
aaaaataaga

SEQ ID NO: 195783 - DNA, 10 bp, Unknown
  misc_feature (1)..( 10): Result.006 file - promoters50/5662749
taaagtaatt

SEQ ID NO: 195784 - DNA, 10 bp, Unknown
  misc_feature (1)..( 10): Result.006 file - promoters50/5662749
aaaaataaac

SEQ ID NO: 195785 - DNA, 10 bp, Unknown
  misc_feature (1)..( 10): Result.006 file - promoters50/5662749
taaaatattc

SEQ ID NO: 195786 - DNA, 13 bp, Unknown
  misc_feature (1)..( 13): Result.006 file - promoters50/5662749
aagggaaaattct

SEQ ID NO: 195787 - DNA, 13 bp, Unknown
  misc_feature (1)..( 13): Result.006 file - promoters50/5662749
acaaaaaaaatct

SEQ ID NO: 195788 - DNA, 13 bp, Unknown
  misc_feature (1)..( 13): Result.006 file - promoters50/5662749
tttgttaaagtct

SEQ ID NO: 195789 - DNA, 13 bp, Unknown
  misc_feature (1)..( 13): Result.006 file - promoters50/5662749
ttgtcaaaattca

SEQ ID NO: 195790 - DNA, 13 bp, Unknown
  misc_feature (1)..( 13): Result.006 file - promoters50/5662749
taaacaaaaaaca

SEQ ID NO: 195791 - DNA, 13 bp, Unknown
  misc_feature (1)..( 13): Result.006 file - promoters50/5662749
ttgtcaacatttt

SEQ ID NO: 195792 - DNA, 13 bp, Unknown
  misc_feature (1)..( 13): Result.006 file - promoters50/5662763
ttgacaacaaacg

SEQ ID NO: 195793 - DNA, 8 bp, Unknown
  misc_feature (1)..( 8): Result.006 file - promoters50/5662763
ttttaata

SEQ ID NO: 195794 - DNA, 8 bp, Unknown
  misc_feature (1)..( 8): Result.006 file - promoters50/5662763
ttttaaaa

SEQ ID NO: 195795 - DNA, 8 bp, Unknown
  misc_feature (1)..( 8): Result.006 file - promoters50/5662763
ttttaata

SEQ ID NO: 195796 - DNA, 9 bp, Unknown
  misc_feature (1)..( 9): Result.006 file - promoters50/5662763
ggagttttt

SEQ ID NO: 195797 - DNA, 9 bp, Unknown
  misc_feature (1)..( 9): Result.006 file - promoters50/5662763
tttgttttt

SEQ ID NO: 195798 - DNA, 9 bp, Unknown
  misc_feature (1)..( 9): Result.006 file - promoters50/5662763
tttgttttg

SEQ ID NO: 195799 - DNA, 9 bp, Unknown
  misc_feature (1)..( 9): Result.006 file - promoters50/5662763
atgattttg

SEQ ID NO: 195800 - DNA, 9 bp, Unknown
  misc_feature (1)..( 9): Result.006 file - promoters50/5662763
atgaatttg

SEQ ID NO: 195801 - DNA, 9 bp, Unknown
  misc_feature (1)..( 9): Result.006 file - promoters50/5662763
cggattttc

SEQ ID NO: 195802 - DNA, 11 bp, Unknown
  misc_feature (1)..( 11): Result.006 file - promoters50/5662763
aatttgtttga

SEQ ID NO: 195803 - DNA, 11 bp, Unknown
  misc_feature (1)..( 11): Result.006 file - promoters50/5662763
aatatgtttta

SEQ ID NO: 195804 - DNA, 11 bp, Unknown
  misc_feature (1)..( 11): Result.006 file - promoters50/5662763
tcattgtatga

SEQ ID NO: 195805 - DNA, 8 bp, Unknown
  misc_feature (1)..( 8): Result.006 file - promoters50/5662763
atagtttt

SEQ ID NO: 195806 - DNA, 8 bp, Unknown
  misc_feature (1)..( 8): Result.006 file - promoters50/5662763
ataattta

SEQ ID NO: 195807 - DNA, 8 bp, Unknown
  misc_feature (1)..( 8): Result.006 file - promoters50/5662763
gtaattta

SEQ ID NO: 195808 - DNA, 10 bp, Unknown
  misc_feature (1)..( 10): Result.006 file - promoters50/5662763
ttttctgttt

SEQ ID NO: 195809 - DNA, 10 bp, Unknown
  misc_feature (1)..( 10): Result.006 file - promoters50/5662763
atttttgttt

SEQ ID NO: 195810 - DNA, 10 bp, Unknown
  misc_feature (1)..( 10): Result.006 file - promoters50/5662763
ttttctgttt

SEQ ID NO: 195811 - DNA, 10 bp, Unknown
  misc_feature (1)..( 10): Result.006 file - promoters50/5662763
atttttgcaa

SEQ ID NO: 195812 - DNA, 8 bp, Unknown
  misc_feature (1)..( 8): Result.006 file - promoters50/5662763
taacaaca

SEQ ID NO: 195813 - DNA, 8 bp, Unknown
  misc_feature (1)..( 8): Result.006 file - promoters50/5662763
taacaaaa

SEQ ID NO: 195814 - DNA, 8 bp, Unknown
  misc_feature (1)..( 8): Result.006 file - promoters50/5662763
taaaaaaa

SEQ ID NO: 195815 - DNA, 8 bp, Unknown
  misc_feature (1)..( 8): Result.006 file - promoters50/5662763
taatataa

SEQ ID NO: 195816 - DNA, 8 bp, Unknown
  misc_feature (1)..( 8): Result.006 file - promoters50/5662763
taatttaa

SEQ ID NO: 195817 - DNA, 8 bp, Unknown
  misc_feature (1)..( 8): Result.006 file - promoters50/5662763
taatataa

SEQ ID NO: 195818 - DNA, 8 bp, Unknown
  misc_feature (1)..( 8): Result.006 file - promoters50/5662763
taatttta

SEQ ID NO: 195819 - DNA, 10 bp, Unknown
  misc_feature (1)..( 10): Result.006 file - promoters50/5662763
ttttgaattg

SEQ ID NO: 195820 - DNA, 10 bp, Unknown
  misc_feature (1)..( 10): Result.006 file - promoters50/5662763
tttggaattg

SEQ ID NO: 195821 - DNA, 10 bp, Unknown
  misc_feature (1)..( 10): Result.006 file - promoters50/5662765
ttttgaattg

SEQ ID NO: 195822 - DNA, 10 bp, Unknown
  misc_feature (1)..( 10): Result.006 file - promoters50/5662765
attgttttaa

SEQ ID NO: 195823 - DNA, 10 bp, Unknown
  misc_feature (1)..( 10): Result.006 file - promoters50/5662765
tttgtattat

SEQ ID NO: 195824 - DNA, 10 bp, Unknown
  misc_feature (1)..( 10): Result.006 file - promoters50/5662765
atttttttct

SEQ ID NO: 195825 - DNA, 10 bp, Unknown
  misc_feature (1)..( 10): Result.006 file - promoters50/5662765
ctatgatttc

SEQ ID NO: 195826 - DNA, 10 bp, Unknown
  misc_feature (1)..( 10): Result.006 file - promoters50/5662765
acctgatttt

SEQ ID NO: 195827 - DNA, 10 bp, Unknown
  misc_feature (1)..( 10): Result.006 file - promoters50/5662765
atttgtctgt

SEQ ID NO: 195828 - DNA, 10 bp, Unknown
  misc_feature (1)..( 10): Result.006 file - promoters50/5662765
aatttattct

SEQ ID NO: 195829 - DNA, 12 bp, Unknown
  misc_feature (1)..( 12): Result.006 file - promoters50/5662765
aatttgatcatt

SEQ ID NO: 195830 - DNA, 12 bp, Unknown
  misc_feature (1)..( 12): Result.006 file - promoters50/5662765
attttgataatg

SEQ ID NO: 195831 - DNA, 12 bp, Unknown
  misc_feature (1)..( 12): Result.006 file - promoters50/5662765
tttttgatgctt

SEQ ID NO: 195832 - DNA, 12 bp, Unknown
  misc_feature (1)..( 12): Result.006 file - promoters50/5662765
aatctgaacatt

SEQ ID NO: 195833 - DNA, 12 bp, Unknown
  misc_feature (1)..( 12): Result.006 file - promoters50/5662765
ttttttatataa

SEQ ID NO: 195834 - DNA, 12 bp, Unknown
  misc_feature (1)..( 12): Result.006 file - promoters50/5662765
aaattggtaata

SEQ ID NO: 195835 - DNA, 12 bp, Unknown
  misc_feature (1)..( 12): Result.006 file - promoters50/5662765
attattatattt

SEQ ID NO: 195836 - DNA, 11 bp, Unknown
  misc_feature (1)..( 11): Result.006 file - promoters50/5662765
aatataatgga

SEQ ID NO: 195837 - DNA, 11 bp, Unknown
  misc_feature (1)..( 11): Result.006 file - promoters50/5662765
catataaccaa

SEQ ID NO: 195838 - DNA, 11 bp, Unknown
  misc_feature (1)..( 11): Result.006 file - promoters50/5662765
tatatgatgga

SEQ ID NO: 195839 - DNA, 11 bp, Unknown
  misc_feature (1)..( 11): Result.006 file - promoters50/5662765
tatttgaaatc

SEQ ID NO: 195840 - DNA, 11 bp, Unknown
  misc_feature (1)..( 11): Result.006 file - promoters50/5662765
catttgatcac

SEQ ID NO: 195841 - DNA, 11 bp, Unknown
  misc_feature (1)..( 11): Result.006 file - promoters50/5662765
aatttgagcgg

SEQ ID NO: 195842 - DNA, 12 bp, Unknown
  misc_feature (1)..( 12): Result.006 file - promoters50/5662765
tagttttgatgt

SEQ ID NO: 195843 - DNA, 12 bp, Unknown
  misc_feature (1)..( 12): Result.006 file - promoters50/5662765
tgattttgacta

SEQ ID NO: 195844 - DNA, 12 bp, Unknown
  misc_feature (1)..( 12): Result.006 file - promoters50/5662765
attttttgttgt

SEQ ID NO: 195845 - DNA, 12 bp, Unknown
  misc_feature (1)..( 12): Result.006 file - promoters50/5662765
atattttgcata

SEQ ID NO: 195846 - DNA, 12 bp, Unknown
  misc_feature (1)..( 12): Result.006 file - promoters50/5662765
atattttatatt

SEQ ID NO: 195847 - DNA, 12 bp, Unknown
  misc_feature (1)..( 12): Result.006 file - promoters50/5662765
cacttttccatc

SEQ ID NO: 195848 - DNA, 12 bp, Unknown
  misc_feature (1)..( 12): Result.006 file - promoters50/5662765
tgtgtttgacat

SEQ ID NO: 195849 - DNA, 13 bp, Unknown
  misc_feature (1)..( 13): Result.006 file - promoters50/5662765
tgttttcactttt

SEQ ID NO: 195850 - DNA, 13 bp, Unknown
  misc_feature (1)..( 13): Result.006 file - promoters50/5662765
atatttaactttt

SEQ ID NO: 195851 - DNA, 13 bp, Unknown
  misc_feature (1)..( 13): Result.006 file - promoters50/5662765
tgttttaagtttc

SEQ ID NO: 195852 - DNA, 13 bp, Unknown
  misc_feature (1)..( 13): Result.006 file - promoters50/5662765
ttttttaattatt

SEQ ID NO: 195853 - DNA, 13 bp, Unknown
  misc_feature (1)..( 13): Result.006 file - promoters50/5662765
tcatttaaggaca

SEQ ID NO: 195854 - DNA, 13 bp, Unknown
  misc_feature (1)..( 13): Result.006 file - promoters50/5662765
ttttttagtattt

SEQ ID NO: 195855 - DNA, 17 bp, Unknown
  misc_feature (1)..( 17): Result.006 file - promoters50/5662765
tgtcttattaaacaaga

SEQ ID NO: 195856 - DNA, 17 bp, Unknown
  misc_feature (1)..( 17): Result.006 file - promoters50/5662765
aacccatagaaacaaac

SEQ ID NO: 195857 - DNA, 17 bp, Unknown
  misc_feature (1)..( 17): Result.006 file - promoters50/5662765
aaagaagaaaaagaaga

SEQ ID NO: 195858 - DNA, 17 bp, Unknown
  misc_feature (1)..( 17): Result.006 file - promoters50/5662765
atcaataggaaacaaaa

SEQ ID NO: 195859 - DNA, 17 bp, Unknown
  misc_feature (1)..( 17): Result.006 file - promoters50/5662765
tgtctaattatacaact

SEQ ID NO: 195860 - DNA, 17 bp, Unknown
  misc_feature (1)..( 17): Result.006 file - promoters50/5662765
cagctaataatagaatt

SEQ ID NO: 195861 - DNA, 10 bp, Unknown
  misc_feature (1)..( 10): Result.006 file - promoters50/5662765
ataggcccaa

SEQ ID NO: 195862 - DNA, 10 bp, Unknown
  misc_feature (1)..( 10): Result.006 file - promoters50/5662765
taaagcccaa

SEQ ID NO: 195863 - DNA, 10 bp, Unknown
  misc_feature (1)..( 10): Result.006 file - promoters50/5662765
aaaggcccat

SEQ ID NO: 195864 - DNA, 10 bp, Unknown
  misc_feature (1)..( 10): Result.006 file - promoters50/5662765
cctggcccat

SEQ ID NO: 195865 - DNA, 10 bp, Unknown
  misc_feature (1)..( 10): Result.006 file - promoters50/5662765
ttcggcccat

SEQ ID NO: 195866 - DNA, 10 bp, Unknown
  misc_feature (1)..( 10): Result.006 file - promoters50/5662765
taaggcccaa

SEQ ID NO: 195867 - DNA, 15 bp, Unknown
  misc_feature (1)..( 15): Result.006 file - promoters50/5662765
tgtcttattaaacaa

SEQ ID NO: 195868 - DNA, 15 bp, Unknown
  misc_feature (1)..( 15): Result.006 file - promoters50/5662765
attctaattgcagct

SEQ ID NO: 195869 - DNA, 15 bp, Unknown
  misc_feature (1)..( 15): Result.006 file - promoters50/5662765
tgtctaattatacaa

SEQ ID NO: 195870 - DNA, 15 bp, Unknown
  misc_feature (1)..( 15): Result.006 file - promoters50/5662765
tttttaattgatgaa

SEQ ID NO: 195871 - DNA, 15 bp, Unknown
  misc_feature (1)..( 15): Result.006 file - promoters50/5662765
gatttaattcaaaaa

SEQ ID NO: 195872 - DNA, 15 bp, Unknown
  misc_feature (1)..( 15): Result.006 file - promoters50/5662769
cctttgatttgaatt

SEQ ID NO: 195873 - DNA, 7 bp, Unknown
  misc_feature (1)..( 7): Result.006 file - promoters50/5662769
taataaa

SEQ ID NO: 195874 - DNA, 7 bp, Unknown
  misc_feature (1)..( 7): Result.006 file - promoters50/5662769
taacaaa

SEQ ID NO: 195875 - DNA, 7 bp, Unknown
  misc_feature (1)..( 7): Result.006 file - promoters50/5662769
aaataaa

SEQ ID NO: 195876 - DNA, 9 bp, Unknown
  misc_feature (1)..( 9): Result.006 file - promoters50/5662769
gagttttgc

SEQ ID NO: 195877 - DNA, 9 bp, Unknown
  misc_feature (1)..( 9): Result.006 file - promoters50/5662769
ttgttttgc

SEQ ID NO: 195878 - DNA, 9 bp, Unknown
  misc_feature (1)..( 9): Result.006 file - promoters50/5662779
ttgatttga

SEQ ID NO: 195879 - DNA, 13 bp, Unknown
  misc_feature (1)..( 13): Result.006 file - promoters50/5662779
aaaggataattga

SEQ ID NO: 195880 - DNA, 13 bp, Unknown
  misc_feature (1)..( 13): Result.006 file - promoters50/5662779
aaaagattaatgt

SEQ ID NO: 195881 - DNA, 13 bp, Unknown
  misc_feature (1)..( 13): Result.006 file - promoters50/5662779
aaaaaattgatgt

SEQ ID NO: 195882 - DNA, 13 bp, Unknown
  misc_feature (1)..( 13): Result.006 file - promoters50/5662779
aaataaagcacac

SEQ ID NO: 195883 - DNA, 14 bp, Unknown
  misc_feature (1)..( 14): Result.006 file - promoters50/5662779
ttgcaaatgagccc

SEQ ID NO: 195884 - DNA, 14 bp, Unknown
  misc_feature (1)..( 14): Result.006 file - promoters50/5662779
ttgcaaaagaggca

SEQ ID NO: 195885 - DNA, 14 bp, Unknown
  misc_feature (1)..( 14): Result.006 file - promoters50/5662779
aagaagaagacgca

SEQ ID NO: 195886 - DNA, 13 bp, Unknown
  misc_feature (1)..( 13): Result.006 file - promoters50/5662779
ggataattgagct

SEQ ID NO: 195887 - DNA, 13 bp, Unknown
  misc_feature (1)..( 13): Result.006 file - promoters50/5662779
aaaaaattgatgt

SEQ ID NO: 195888 - DNA, 13 bp, Unknown
  misc_feature (1)..( 13): Result.006 file - promoters50/5662779
aaaagattaatgt

SEQ ID NO: 195889 - DNA, 11 bp, Unknown
  misc_feature (1)..( 11): Result.006 file - promoters50/5662779
agtcaaagaaa

SEQ ID NO: 195890 - DNA, 11 bp, Unknown
  misc_feature (1)..( 11): Result.006 file - promoters50/5662779
agttaaataaa

SEQ ID NO: 195891 - DNA, 11 bp, Unknown
  misc_feature (1)..( 11): Result.006 file - promoters50/5662779
cgttaaattat

SEQ ID NO: 195892 - DNA, 15 bp, Unknown
  misc_feature (1)..( 15): Result.006 file - promoters50/5662779
aaaagattaatgtaa

SEQ ID NO: 195893 - DNA, 15 bp, Unknown
  misc_feature (1)..( 15): Result.006 file - promoters50/5662779
cactctttaatataa

SEQ ID NO: 195894 - DNA, 15 bp, Unknown
  misc_feature (1)..( 15): Result.006 file - promoters50/5662779
aaaaaattgatgtcg

SEQ ID NO: 195895 - DNA, 8 bp, Unknown
  misc_feature (1)..( 8): Result.006 file - promoters50/5662779
agtgaaga

SEQ ID NO: 195896 - DNA, 8 bp, Unknown
  misc_feature (1)..( 8): Result.006 file - promoters50/5662779
agtgaaca

SEQ ID NO: 195897 - DNA, 8 bp, Unknown
  misc_feature (1)..( 8): Result.006 file - promoters50/5662783
agtgcaca

SEQ ID NO: 195898 - DNA, 15 bp, Unknown
  misc_feature (1)..( 15): Result.006 file - promoters50/5662783
aatcacttaatcacc

SEQ ID NO: 195899 - DNA, 15 bp, Unknown
  misc_feature (1)..( 15): Result.006 file - promoters50/5662783
aatgacttaatccgc

SEQ ID NO: 195900 - DNA, 15 bp, Unknown
  misc_feature (1)..( 15): Result.006 file - promoters50/5662783
gataaattattcaca

SEQ ID NO: 195901 - DNA, 15 bp, Unknown
  misc_feature (1)..( 15): Result.006 file - promoters50/5662783
agaaactgaatttcg

SEQ ID NO: 195902 - DNA, 15 bp, Unknown
  misc_feature (1)..( 15): Result.006 file - promoters50/5662783
tgagatttaatcgga

SEQ ID NO: 195903 - DNA, 15 bp, Unknown
  misc_feature (1)..( 15): Result.006 file - promoters50/5662783
gtttttgtaataatt

SEQ ID NO: 195904 - DNA, 10 bp, Unknown
  misc_feature (1)..( 10): Result.006 file - promoters50/5662783
agaaaattat

SEQ ID NO: 195905 - DNA, 10 bp, Unknown
  misc_feature (1)..( 10): Result.006 file - promoters50/5662783
ttaaaattta

SEQ ID NO: 195906 - DNA, 10 bp, Unknown
  misc_feature (1)..( 10): Result.006 file - promoters50/5662783
caaaaattca

SEQ ID NO: 195907 - DNA, 10 bp, Unknown
  misc_feature (1)..( 10): Result.006 file - promoters50/5662783
ttacaatgtt

SEQ ID NO: 195908 - DNA, 10 bp, Unknown
  misc_feature (1)..( 10): Result.006 file - promoters50/5662783
agtaaattcg

SEQ ID NO: 195909 - DNA, 10 bp, Unknown
  misc_feature (1)..( 10): Result.006 file - promoters50/5662783
atcaaactcg

SEQ ID NO: 195910 - DNA, 13 bp, Unknown
  misc_feature (1)..( 13): Result.006 file - promoters50/5662783
tctcaaattgttt

SEQ ID NO: 195911 - DNA, 13 bp, Unknown
  misc_feature (1)..( 13): Result.006 file - promoters50/5662783
tatcatatttttg

SEQ ID NO: 195912 - DNA, 13 bp, Unknown
  misc_feature (1)..( 13): Result.006 file - promoters50/5662783
gaataaatagttt

SEQ ID NO: 195913 - DNA, 13 bp, Unknown
  misc_feature (1)..( 13): Result.006 file - promoters50/5662783
tctgaaaatttta

SEQ ID NO: 195914 - DNA, 13 bp, Unknown
  misc_feature (1)..( 13): Result.006 file - promoters50/5662783
tcttaaacacttg

SEQ ID NO: 195915 - DNA, 13 bp, Unknown
  misc_feature (1)..( 13): Result.006 file - promoters50/5662785
tatcctataattg

SEQ ID NO: 195916 - DNA, 10 bp, Unknown
  misc_feature (1)..( 10): Result.006 file - promoters50/5662785
aatgtgtaat

SEQ ID NO: 195917 - DNA, 10 bp, Unknown
  misc_feature (1)..( 10): Result.006 file - promoters50/5662785
attgtttaat

SEQ ID NO: 195918 - DNA, 10 bp, Unknown
  misc_feature (1)..( 10): Result.006 file - promoters50/5662785
attgttttct

SEQ ID NO: 195919 - DNA, 8 bp, Unknown
  misc_feature (1)..( 8): Result.006 file - promoters50/5662785
ttttcttt

SEQ ID NO: 195920 - DNA, 8 bp, Unknown
  misc_feature (1)..( 8): Result.006 file - promoters50/5662785
atttctta

SEQ ID NO: 195921 - DNA, 8 bp, Unknown
  misc_feature (1)..( 8): Result.006 file - promoters50/5662805
attgctta

SEQ ID NO: 195922 - DNA, 11 bp, Unknown
  misc_feature (1)..( 11): Result.006 file - promoters50/5662805
tttgttttctc

SEQ ID NO: 195923 - DNA, 11 bp, Unknown
  misc_feature (1)..( 11): Result.006 file - promoters50/5662805
gatgttttttt

SEQ ID NO: 195924 - DNA, 11 bp, Unknown
  misc_feature (1)..( 11): Result.006 file - promoters50/5662805
tttggtttctc

SEQ ID NO: 195925 - DNA, 11 bp, Unknown
  misc_feature (1)..( 11): Result.006 file - promoters50/5662805
tttggtcatct

SEQ ID NO: 195926 - DNA, 10 bp, Unknown
  misc_feature (1)..( 10): Result.006 file - promoters50/5662805
tttttacttt

SEQ ID NO: 195927 - DNA, 10 bp, Unknown
  misc_feature (1)..( 10): Result.006 file - promoters50/5662805
tttttatata

SEQ ID NO: 195928 - DNA, 10 bp, Unknown
  misc_feature (1)..( 10): Result.006 file - promoters50/5662805
aatttaataa

SEQ ID NO: 195929 - DNA, 10 bp, Unknown
  misc_feature (1)..( 10): Result.006 file - promoters50/5662805
tctttcatat

SEQ ID NO: 195930 - DNA, 11 bp, Unknown
  misc_feature (1)..( 11): Result.006 file - promoters50/5662805
atttgttttct

SEQ ID NO: 195931 - DNA, 11 bp, Unknown
  misc_feature (1)..( 11): Result.006 file - promoters50/5662805
attagttgtga

SEQ ID NO: 195932 - DNA, 12 bp, Unknown
  misc_feature (1)..( 12): Result.006 file - promoters50/5662805
ttttggtttctc

SEQ ID NO: 195933 - DNA, 12 bp, Unknown
  misc_feature (1)..( 12): Result.006 file - promoters50/5662805
cgttagatgttt

SEQ ID NO: 195934 - DNA, 12 bp, Unknown
  misc_feature (1)..( 12): Result.006 file - promoters50/5662805
atttggtcatct

SEQ ID NO: 195935 - DNA, 17 bp, Unknown
  misc_feature (1)..( 17): Result.006 file - promoters50/5662805
tactatataatggtagc

SEQ ID NO: 195936 - DNA, 17 bp, Unknown
  misc_feature (1)..( 17): Result.006 file - promoters50/5662805
gcctatataaacattac

SEQ ID NO: 195937 - DNA, 17 bp, Unknown
  misc_feature (1)..( 17): Result.006 file - promoters50/5662805
ctctatataatagtagc

SEQ ID NO: 195938 - DNA, 17 bp, Unknown
  misc_feature (1)..( 17): Result.006 file - promoters50/5662809
tactatataaacaccaa

SEQ ID NO: 195939 - DNA, 11 bp, Unknown
  misc_feature (1)..( 11): Result.006 file - promoters50/5662809
acctttgttat

SEQ ID NO: 195940 - DNA, 11 bp, Unknown
  misc_feature (1)..( 11): Result.006 file - promoters50/5662809
tttttttttag

SEQ ID NO: 195941 - DNA, 11 bp, Unknown
  misc_feature (1)..( 11): Result.006 file - promoters50/5662809
aaatttgatat

SEQ ID NO: 195942 - DNA, 12 bp, Unknown
  misc_feature (1)..( 12): Result.006 file - promoters50/5662809
attttattttat

SEQ ID NO: 195943 - DNA, 12 bp, Unknown
  misc_feature (1)..( 12): Result.006 file - promoters50/5662809
ctttcttttaat

SEQ ID NO: 195944 - DNA, 12 bp, Unknown
  misc_feature (1)..( 12): Result.006 file - promoters50/5662809
gtgtctttccca

SEQ ID NO: 195945 - DNA, 8 bp, Unknown
  misc_feature (1)..( 8): Result.006 file - promoters50/5662809
cttttata

SEQ ID NO: 195946 - DNA, 8 bp, Unknown
  misc_feature (1)..( 8): Result.006 file - promoters50/5662809
cttttaaa

SEQ ID NO: 195947 - DNA, 8 bp, Unknown
  misc_feature (1)..( 8): Result.006 file - promoters50/5662809
gttttatt

SEQ ID NO: 195948 - DNA, 8 bp, Unknown
  misc_feature (1)..( 8): Result.006 file - promoters50/5662809
ttttcatt

SEQ ID NO: 195949 - DNA, 8 bp, Unknown
  misc_feature (1)..( 8): Result.006 file - promoters50/5662809
ttttgtca

SEQ ID NO: 195950 - DNA, 8 bp, Unknown
  misc_feature (1)..( 8): Result.006 file - promoters50/5662828
aattcatt

SEQ ID NO: 195951 - DNA, 11 bp, Unknown
  misc_feature (1)..( 11): Result.006 file - promoters50/5662828
tttataagtat

SEQ ID NO: 195952 - DNA, 11 bp, Unknown
  misc_feature (1)..( 11): Result.006 file - promoters50/5662828
tttgtaacttc

SEQ ID NO: 195953 - DNA, 11 bp, Unknown
  misc_feature (1)..( 11): Result.006 file - promoters50/5662828
cttataattat

SEQ ID NO: 195954 - DNA, 11 bp, Unknown
  misc_feature (1)..( 11): Result.006 file - promoters50/5662828
tttaaaagtaa

SEQ ID NO: 195955 - DNA, 11 bp, Unknown
  misc_feature (1)..( 11): Result.006 file - promoters50/5662828
tttttaaattt

SEQ ID NO: 195956 - DNA, 11 bp, Unknown
  misc_feature (1)..( 11): Result.006 file - promoters50/5662828
tttgaaaagag

SEQ ID NO: 195957 - DNA, 17 bp, Unknown
  misc_feature (1)..( 17): Result.006 file - promoters50/5662828
aatcttttgattctaaa

SEQ ID NO: 195958 - DNA, 17 bp, Unknown
  misc_feature (1)..( 17): Result.006 file - promoters50/5662828
taaattttgaaataatt

SEQ ID NO: 195959 - DNA, 17 bp, Unknown
  misc_feature (1)..( 17): Result.006 file - promoters50/5662828
ttgatttagataccgga

SEQ ID NO: 195960 - DNA, 17 bp, Unknown
  misc_feature (1)..( 17): Result.006 file - promoters50/5662828
tgtgttttgaaaagagt

SEQ ID NO: 195961 - DNA, 17 bp, Unknown
  misc_feature (1)..( 17): Result.006 file - promoters50/5662828
taaattttaaaattatt

SEQ ID NO: 195962 - DNA, 17 bp, Unknown
  misc_feature (1)..( 17): Result.006 file - promoters50/5662828
aattttttaaaatatat

SEQ ID NO: 195963 - DNA, 17 bp, Unknown
  misc_feature (1)..( 17): Result.006 file - promoters50/5662828
aaaatgttagataggaa

SEQ ID NO: 195964 - DNA, 17 bp, Unknown
  misc_feature (1)..( 17): Result.006 file - promoters50/5662828
ttgattctaaaatattg

SEQ ID NO: 195965 - DNA, 17 bp, Unknown
  misc_feature (1)..( 17): Result.006 file - promoters50/5662828
ccgggtctaaaactccg

SEQ ID NO: 195966 - DNA, 17 bp, Unknown
  misc_feature (1)..( 17): Result.006 file - promoters50/5662828
taaattttaaaattatt

SEQ ID NO: 195967 - DNA, 17 bp, Unknown
  misc_feature (1)..( 17): Result.006 file - promoters50/5662828
aattttttaaaatatat

SEQ ID NO: 195968 - DNA, 17 bp, Unknown
  misc_feature (1)..( 17): Result.006 file - promoters50/5662828
taaattttgaaataatt

SEQ ID NO: 195969 - DNA, 17 bp, Unknown
  misc_feature (1)..( 17): Result.006 file - promoters50/5662832
tttccataaaaatgtta

SEQ ID NO: 195970 - DNA, 8 bp, Unknown
  misc_feature (1)..( 8): Result.006 file - promoters50/5662832
tttggttc

SEQ ID NO: 195971 - DNA, 8 bp, Unknown
  misc_feature (1)..( 8): Result.006 file - promoters50/5662832
cttgtttc

SEQ ID NO: 195972 - DNA, 8 bp, Unknown
  misc_feature (1)..( 8): Result.006 file - promoters50/5662832
tttggttg

SEQ ID NO: 195973 - DNA, 8 bp, Unknown
  misc_feature (1)..( 8): Result.006 file - promoters50/5662832
attattta

SEQ ID NO: 195974 - DNA, 8 bp, Unknown
  misc_feature (1)..( 8): Result.006 file - promoters50/5662832
attcttta

SEQ ID NO: 195975 - DNA, 8 bp, Unknown
  misc_feature (1)..( 8): Result.006 file - promoters50/5662832
attttttg

SEQ ID NO: 195976 - DNA, 14 bp, Unknown
  misc_feature (1)..( 14): Result.006 file - promoters50/5662832
gattcttggagttg

SEQ ID NO: 195977 - DNA, 14 bp, Unknown
  misc_feature (1)..( 14): Result.006 file - promoters50/5662832
gattctcgcacgaa

SEQ ID NO: 195978 - DNA, 14 bp, Unknown
  misc_feature (1)..( 14): Result.006 file - promoters50/5662835
tattttcgctcgaa

SEQ ID NO: 195979 - DNA, 10 bp, Unknown
  misc_feature (1)..( 10): Result.006 file - promoters50/5662835
aaacaaattt

SEQ ID NO: 195980 - DNA, 10 bp, Unknown
  misc_feature (1)..( 10): Result.006 file - promoters50/5662835
agacacattc

SEQ ID NO: 195981 - DNA, 10 bp, Unknown
  misc_feature (1)..( 10): Result.006 file - promoters50/5662835
gttcaatttt

SEQ ID NO: 195982 - DNA, 10 bp, Unknown
  misc_feature (1)..( 10): Result.006 file - promoters50/5662835
tgacaaatct

SEQ ID NO: 195983 - DNA, 10 bp, Unknown
  misc_feature (1)..( 10): Result.006 file - promoters50/5662843
aaaaaaattt

SEQ ID NO: 195984 - DNA, 10 bp, Unknown
  misc_feature (1)..( 10): Result.006 file - promoters50/5662843
tgtcaaaaat

SEQ ID NO: 195985 - DNA, 10 bp, Unknown
  misc_feature (1)..( 10): Result.006 file - promoters50/5662843
aatcataaat

SEQ ID NO: 195986 - DNA, 10 bp, Unknown
  misc_feature (1)..( 10): Result.006 file - promoters50/5662846
aatcatagtc

SEQ ID NO: 195987 - DNA, 11 bp, Unknown
  misc_feature (1)..( 11): Result.006 file - promoters50/5662846
tttcttttatg

SEQ ID NO: 195988 - DNA, 11 bp, Unknown
  misc_feature (1)..( 11): Result.006 file - promoters50/5662846
atttttttata

SEQ ID NO: 195989 - DNA, 11 bp, Unknown
  misc_feature (1)..( 11): Result.006 file - promoters50/5662846
tttcttttatt

SEQ ID NO: 195990 - DNA, 11 bp, Unknown
  misc_feature (1)..( 11): Result.006 file - promoters50/5662846
tcggtttaatt

SEQ ID NO: 195991 - DNA, 12 bp, Unknown
  misc_feature (1)..( 12): Result.006 file - promoters50/5662846
ataaaatataaa

SEQ ID NO: 195992 - DNA, 12 bp, Unknown
  misc_feature (1)..( 12): Result.006 file - promoters50/5662846
ataaaatataaa

SEQ ID NO: 195993 - DNA, 12 bp, Unknown
  misc_feature (1)..( 12): Result.006 file - promoters50/5662846
ataaattggaac

SEQ ID NO: 195994 - DNA, 8 bp, Unknown
  misc_feature (1)..( 8): Result.006 file - promoters50/5662846
tttcgaaa

SEQ ID NO: 195995 - DNA, 8 bp, Unknown
  misc_feature (1)..( 8): Result.006 file - promoters50/5662846
tttctaaa

SEQ ID NO: 195996 - DNA, 8 bp, Unknown
  misc_feature (1)..( 8): Result.006 file - promoters50/5662846
ttttgaag

SEQ ID NO: 195997 - DNA, 7 bp, Unknown
  misc_feature (1)..( 7): Result.006 file - promoters50/5662846
taaaaaa

SEQ ID NO: 195998 - DNA, 7 bp, Unknown
  misc_feature (1)..( 7): Result.006 file - promoters50/5662846
taaaaaa

SEQ ID NO: 195999 - DNA, 7 bp, Unknown
  misc_feature (1)..( 7): Result.006 file - promoters50/5662846
caaaaac

SEQ ID NO: 196000 - DNA, 16 bp, Unknown
  misc_feature (1)..( 16): Result.006 file - promoters50/5662846
aaaataattaccaaat

SEQ ID NO: 196001 - DNA, 16 bp, Unknown
  misc_feature (1)..( 16): Result.006 file - promoters50/5662846
aaaataataacctgga

SEQ ID NO: 196002 - DNA, 16 bp, Unknown
  misc_feature (1)..( 16): Result.006 file - promoters50/5662846
tttatgattacctaat

SEQ ID NO: 196003 - DNA, 9 bp, Unknown
  misc_feature (1)..( 9): Result.006 file - promoters50/5662846
tcaaaaaaa

SEQ ID NO: 196004 - DNA, 9 bp, Unknown
  misc_feature (1)..( 9): Result.006 file - promoters50/5662846
tcaaaaata

SEQ ID NO: 196005 - DNA, 9 bp, Unknown
  misc_feature (1)..( 9): Result.006 file - promoters50/5662846
ttaaaaata

SEQ ID NO: 196006 - DNA, 11 bp, Unknown
  misc_feature (1)..( 11): Result.006 file - promoters50/5662846
taaaacacaaa

SEQ ID NO: 196007 - DNA, 11 bp, Unknown
  misc_feature (1)..( 11): Result.006 file - promoters50/5662846
aaaaatacaaa

SEQ ID NO: 196008 - DNA, 11 bp, Unknown
  misc_feature (1)..( 11): Result.006 file - promoters50/5662850
aaaaatagctc

SEQ ID NO: 196009 - DNA, 8 bp, Unknown
  misc_feature (1)..( 8): Result.006 file - promoters50/5662850
gcaaattt

SEQ ID NO: 196010 - DNA, 8 bp, Unknown
  misc_feature (1)..( 8): Result.006 file - promoters50/5662850
tcaaattg

SEQ ID NO: 196011 - DNA, 8 bp, Unknown
  misc_feature (1)..( 8): Result.006 file - promoters50/5662850
tcaatttt

SEQ ID NO: 196012 - DNA, 8 bp, Unknown
  misc_feature (1)..( 8): Result.006 file - promoters50/5662850
gcaaatac

SEQ ID NO: 196013 - DNA, 15 bp, Unknown
  misc_feature (1)..( 15): Result.006 file - promoters50/5662850
aataaaggaaaaata

SEQ ID NO: 196014 - DNA, 15 bp, Unknown
  misc_feature (1)..( 15): Result.006 file - promoters50/5662850
aataagggaacaatc

SEQ ID NO: 196015 - DNA, 15 bp, Unknown
  misc_feature (1)..( 15): Result.006 file - promoters50/5662850
tctctatataaaata

SEQ ID NO: 196016 - DNA, 11 bp, Unknown
  misc_feature (1)..( 11): Result.006 file - promoters50/5662850
cgtagctaaag

SEQ ID NO: 196017 - DNA, 11 bp, Unknown
  misc_feature (1)..( 11): Result.006 file - promoters50/5662850
cgtatctaaag

SEQ ID NO: 196018 - DNA, 11 bp, Unknown
  misc_feature (1)..( 11): Result.006 file - promoters50/5662850
cttatctaaac

SEQ ID NO: 196019 - DNA, 12 bp, Unknown
  misc_feature (1)..( 12): Result.006 file - promoters50/5662850
aaatttaaacac

SEQ ID NO: 196020 - DNA, 12 bp, Unknown
  misc_feature (1)..( 12): Result.006 file - promoters50/5662850
taatttatatgt

SEQ ID NO: 196021 - DNA, 12 bp, Unknown
  misc_feature (1)..( 12): Result.006 file - promoters50/5662850
taacttatttgt

SEQ ID NO: 196022 - DNA, 14 bp, Unknown
  misc_feature (1)..( 14): Result.006 file - promoters50/5662850
ctaaaaatatgttt

SEQ ID NO: 196023 - DNA, 14 bp, Unknown
  misc_feature (1)..( 14): Result.006 file - promoters50/5662850
taatttatatgttt

SEQ ID NO: 196024 - DNA, 14 bp, Unknown
  misc_feature (1)..( 14): Result.006 file - promoters50/5662850
taacttatttgtgg

SEQ ID NO: 196025 - DNA, 8 bp, Unknown
  misc_feature (1)..( 8): Result.006 file - promoters50/5662850
tcttcttt

SEQ ID NO: 196026 - DNA, 8 bp, Unknown
  misc_feature (1)..( 8): Result.006 file - promoters50/5662850
tcttcttt

SEQ ID NO: 196027 - DNA, 9 bp, Unknown
  misc_feature (1)..( 9): Result.006 file - promoters50/5662850
tcttcattt

SEQ ID NO: 196028 - DNA, 8 bp, Unknown
  misc_feature (1)..( 8): Result.006 file - promoters50/5662850
cttttctt

SEQ ID NO: 196029 - DNA, 8 bp, Unknown
  misc_feature (1)..( 8): Result.006 file - promoters50/5662850
tttttctt

SEQ ID NO: 196030 - DNA, 9 bp, Unknown
  misc_feature (1)..( 9): Result.006 file - promoters50/5662850
tttattctt

SEQ ID NO: 196031 - DNA, 10 bp, Unknown
  misc_feature (1)..( 10): Result.006 file - promoters50/5662850
ctttgttctt

SEQ ID NO: 196032 - DNA, 10 bp, Unknown
  misc_feature (1)..( 10): Result.006 file - promoters50/5662850
ctttattctt

SEQ ID NO: 196033 - DNA, 10 bp, Unknown
  misc_feature (1)..( 10): Result.006 file - promoters50/5662850
ttttcttctt

SEQ ID NO: 196034 - DNA, 9 bp, Unknown
  misc_feature (1)..( 9): Result.006 file - promoters50/5662850
agaataaaa

SEQ ID NO: 196035 - DNA, 9 bp, Unknown
  misc_feature (1)..( 9): Result.006 file - promoters50/5662850
tatataaaa

SEQ ID NO: 196036 - DNA, 9 bp, Unknown
  misc_feature (1)..( 9): Result.006 file - promoters50/5662850
tatataaat

SEQ ID NO: 196037 - DNA, 9 bp, Unknown
  misc_feature (1)..( 9): Result.006 file - promoters50/5662850
ataatatct

SEQ ID NO: 196038 - DNA, 9 bp, Unknown
  misc_feature (1)..( 9): Result.006 file - promoters50/5662850
ataatactt

SEQ ID NO: 196039 - DNA, 9 bp, Unknown
  misc_feature (1)..( 9): Result.006 file - promoters50/5662850
ataaaactt

SEQ ID NO: 196040 - DNA, 7 bp, Unknown
  misc_feature (1)..( 7): Result.006 file - promoters50/5662850
tttaggg

SEQ ID NO: 196041 - DNA, 7 bp, Unknown
  misc_feature (1)..( 7): Result.006 file - promoters50/5662850
ttttggg

SEQ ID NO: 196042 - DNA, 8 bp, Unknown
  misc_feature (1)..( 8): Result.006 file - promoters50/5662893
cttacggg

SEQ ID NO: 196043 - DNA, 9 bp, Unknown
  misc_feature (1)..( 9): Result.006 file - promoters50/5662893
tttgtattc

SEQ ID NO: 196044 - DNA, 9 bp, Unknown
  misc_feature (1)..( 9): Result.006 file - promoters50/5662893
tttggattt

SEQ ID NO: 196045 - DNA, 9 bp, Unknown
  misc_feature (1)..( 9): Result.006 file - promoters50/5662893
tttttattg

SEQ ID NO: 196046 - DNA, 9 bp, Unknown
  misc_feature (1)..( 9): Result.006 file - promoters50/5662893
tttttagtg

SEQ ID NO: 196047 - DNA, 9 bp, Unknown
  misc_feature (1)..( 9): Result.006 file - promoters50/5662893
ttttttttt

SEQ ID NO: 196048 - DNA, 9 bp, Unknown
  misc_feature (1)..( 9): Result.006 file - promoters50/5662893
gtttgatta

SEQ ID NO: 196049 - DNA, 11 bp, Unknown
  misc_feature (1)..( 11): Result.006 file - promoters50/5662893
agaaaaaaaaa

SEQ ID NO: 196050 - DNA, 11 bp, Unknown
  misc_feature (1)..( 11): Result.006 file - promoters50/5662893
agaaaaaaaaa

SEQ ID NO: 196051 - DNA, 11 bp, Unknown
  misc_feature (1)..( 11): Result.006 file - promoters50/5662893
agacaaataga

SEQ ID NO: 196052 - DNA, 11 bp, Unknown
  misc_feature (1)..( 11): Result.006 file - promoters50/5662893
tgacaaaaaaa

SEQ ID NO: 196053 - DNA, 11 bp, Unknown
  misc_feature (1)..( 11): Result.006 file - promoters50/5662893
tgacaaaccaa

SEQ ID NO: 196054 - DNA, 11 bp, Unknown
  misc_feature (1)..( 11): Result.006 file - promoters50/5662893
agaaacaatgt

SEQ ID NO: 196055 - DNA, 11 bp, Unknown
  misc_feature (1)..( 11): Result.006 file - promoters50/5662893
gatattatagg

SEQ ID NO: 196056 - DNA, 11 bp, Unknown
  misc_feature (1)..( 11): Result.006 file - promoters50/5662893
aaaattatatc

SEQ ID NO: 196057 - DNA, 11 bp, Unknown
  misc_feature (1)..( 11): Result.006 file - promoters50/5662893
cgtatcataaa

SEQ ID NO: 196058 - DNA, 11 bp, Unknown
  misc_feature (1)..( 11): Result.006 file - promoters50/5662893
aaaattatacc

SEQ ID NO: 196059 - DNA, 11 bp, Unknown
  misc_feature (1)..( 11): Result.006 file - promoters50/5662893
caaagtatctt

SEQ ID NO: 196060 - DNA, 11 bp, Unknown
  misc_feature (1)..( 11): Result.006 file - promoters50/5662895
tatttcaaaaa

SEQ ID NO: 196061 - DNA, 11 bp, Unknown
  misc_feature (1)..( 11): Result.006 file - promoters50/5662895
tttttcttact

SEQ ID NO: 196062 - DNA, 11 bp, Unknown
  misc_feature (1)..( 11): Result.006 file - promoters50/5662895
accttcttagt

SEQ ID NO: 196063 - DNA, 11 bp, Unknown
  misc_feature (1)..( 11): Result.006 file - promoters50/5662895
atattcttaac

SEQ ID NO: 196064 - DNA, 11 bp, Unknown
  misc_feature (1)..( 11): Result.006 file - promoters50/5662895
atattcgtaac

SEQ ID NO: 196065 - DNA, 11 bp, Unknown
  misc_feature (1)..( 11): Result.006 file - promoters50/5662895
aaaattttgca

SEQ ID NO: 196066 - DNA, 11 bp, Unknown
  misc_feature (1)..( 11): Result.006 file - promoters50/5662895
aaaatttttag

SEQ ID NO: 196067 - DNA, 12 bp, Unknown
  misc_feature (1)..( 12): Result.006 file - promoters50/5662895
tatattcttaac

SEQ ID NO: 196068 - DNA, 12 bp, Unknown
  misc_feature (1)..( 12): Result.006 file - promoters50/5662895
aatattcgtaac

SEQ ID NO: 196069 - DNA, 7 bp, Unknown
  misc_feature (1)..( 7): Result.006 file - promoters50/5662895
ataaaaa

SEQ ID NO: 196070 - DNA, 7 bp, Unknown
  misc_feature (1)..( 7): Result.006 file - promoters50/5662895
ataaaaa

SEQ ID NO: 196071 - DNA, 8 bp, Unknown
  misc_feature (1)..( 8): Result.006 file - promoters50/5662895
gtaacaaa

SEQ ID NO: 196072 - DNA, 8 bp, Unknown
  misc_feature (1)..( 8): Result.006 file - promoters50/5662902
atataaaa

SEQ ID NO: 196073 - DNA, 12 bp, Unknown
  misc_feature (1)..( 12): Result.006 file - promoters50/5662902
tgaagatggacg

SEQ ID NO: 196074 - DNA, 12 bp, Unknown
  misc_feature (1)..( 12): Result.006 file - promoters50/5662902
agaaaatgttct

SEQ ID NO: 196075 - DNA, 12 bp, Unknown
  misc_feature (1)..( 12): Result.006 file - promoters50/5662902
tttagatggatt

SEQ ID NO: 196076 - DNA, 12 bp, Unknown
  misc_feature (1)..( 12): Result.006 file - promoters50/5662902
agaagataataa

SEQ ID NO: 196077 - DNA, 12 bp, Unknown
  misc_feature (1)..( 12): Result.006 file - promoters50/5662902
ttttgatgtgta

SEQ ID NO: 196078 - DNA, 12 bp, Unknown
  misc_feature (1)..( 12): Result.006 file - promoters50/5662906
atttgatactaa

SEQ ID NO: 196079 - DNA, 9 bp, Unknown
  misc_feature (1)..( 9): Result.006 file - promoters50/5662906
taaaagaaa

SEQ ID NO: 196080 - DNA, 9 bp, Unknown
  misc_feature (1)..( 9): Result.006 file - promoters50/5662906
acaaaaaaa

SEQ ID NO: 196081 - DNA, 9 bp, Unknown
  misc_feature (1)..( 9): Result.006 file - promoters50/5662906
acataaaat

SEQ ID NO: 196082 - DNA, 8 bp, Unknown
  misc_feature (1)..( 8): Result.006 file - promoters50/5662906
ataaaaca

SEQ ID NO: 196083 - DNA, 8 bp, Unknown
  misc_feature (1)..( 8): Result.006 file - promoters50/5662906
ataaaatt

SEQ ID NO: 196084 - DNA, 8 bp, Unknown
  misc_feature (1)..( 8): Result.006 file - promoters50/5662910
acaaaaaa

SEQ ID NO: 196085 - DNA, 12 bp, Unknown
  misc_feature (1)..( 12): Result.006 file - promoters50/5662910
gagagagaaaga

SEQ ID NO: 196086 - DNA, 12 bp, Unknown
  misc_feature (1)..( 12): Result.006 file - promoters50/5662910
atatgagaaaat

SEQ ID NO: 196087 - DNA, 12 bp, Unknown
  misc_feature (1)..( 12): Result.006 file - promoters50/5662910
ctgtgaaaaaaa

SEQ ID NO: 196088 - DNA, 12 bp, Unknown
  misc_feature (1)..( 12): Result.006 file - promoters50/5662910
tttttagaaaat

SEQ ID NO: 196089 - DNA, 12 bp, Unknown
  misc_feature (1)..( 12): Result.006 file - promoters50/5662910
ttttgaaaatat

SEQ ID NO: 196090 - DNA, 12 bp, Unknown
  misc_feature (1)..( 12): Result.006 file - promoters50/5662910
taatgttaaatt

SEQ ID NO: 196091 - DNA, 13 bp, Unknown
  misc_feature (1)..( 13): Result.006 file - promoters50/5662910
ttcctaattgtaa

SEQ ID NO: 196092 - DNA, 13 bp, Unknown
  misc_feature (1)..( 13): Result.006 file - promoters50/5662910
aaattaaatgttg

SEQ ID NO: 196093 - DNA, 13 bp, Unknown
  misc_feature (1)..( 13): Result.006 file - promoters50/5662910
aaattaattgata

SEQ ID NO: 196094 - DNA, 13 bp, Unknown
  misc_feature (1)..( 13): Result.006 file - promoters50/5662910
aaattaaatatat

SEQ ID NO: 196095 - DNA, 13 bp, Unknown
  misc_feature (1)..( 13): Result.006 file - promoters50/5662910
cacataaatcaaa

SEQ ID NO: 196096 - DNA, 13 bp, Unknown
  misc_feature (1)..( 13): Result.006 file - promoters50/5662910
gaaaacaatgaaa

SEQ ID NO: 196097 - DNA, 10 bp, Unknown
  misc_feature (1)..( 10): Result.006 file - promoters50/5662910
aagaagatag

SEQ ID NO: 196098 - DNA, 10 bp, Unknown
  misc_feature (1)..( 10): Result.006 file - promoters50/5662910
gtgaaaataa

SEQ ID NO: 196099 - DNA, 10 bp, Unknown
  misc_feature (1)..( 10): Result.006 file - promoters50/5662910
cagaatatat

SEQ ID NO: 196100 - DNA, 10 bp, Unknown
  misc_feature (1)..( 10): Result.006 file - promoters50/5662910
aaaaaaatta

SEQ ID NO: 196101 - DNA, 10 bp, Unknown
  misc_feature (1)..( 10): Result.006 file - promoters50/5662910
ataaatttat

SEQ ID NO: 196102 - DNA, 10 bp, Unknown
  misc_feature (1)..( 10): Result.006 file - promoters50/5662914
ttgaatattt

SEQ ID NO: 196103 - DNA, 10 bp, Unknown
  misc_feature (1)..( 10): Result.006 file - promoters50/5662914
atgaagttga

SEQ ID NO: 196104 - DNA, 10 bp, Unknown
  misc_feature (1)..( 10): Result.006 file - promoters50/5662914
aagaagttga

SEQ ID NO: 196105 - DNA, 10 bp, Unknown
  misc_feature (1)..( 10): Result.006 file - promoters50/5662914
gagaaattga

SEQ ID NO: 196106 - DNA, 10 bp, Unknown
  misc_feature (1)..( 10): Result.006 file - promoters50/5662914
gacaagtagt

SEQ ID NO: 196107 - DNA, 10 bp, Unknown
  misc_feature (1)..( 10): Result.006 file - promoters50/5662914
aagaagtgtg

SEQ ID NO: 196108 - DNA, 10 bp, Unknown
  misc_feature (1)..( 10): Result.006 file - promoters50/5662914
aagaagaaga

SEQ ID NO: 196109 - DNA, 10 bp, Unknown
  misc_feature (1)..( 10): Result.006 file - promoters50/5662914
tttattgaaa

SEQ ID NO: 196110 - DNA, 10 bp, Unknown
  misc_feature (1)..( 10): Result.006 file - promoters50/5662914
tttattacgt

SEQ ID NO: 196111 - DNA, 10 bp, Unknown
  misc_feature (1)..( 10): Result.006 file - promoters50/5662914
tttattaaaa

SEQ ID NO: 196112 - DNA, 10 bp, Unknown
  misc_feature (1)..( 10): Result.006 file - promoters50/5662914
tttagaaaac

SEQ ID NO: 196113 - DNA, 10 bp, Unknown
  misc_feature (1)..( 10): Result.006 file - promoters50/5662914
acaattaaac

SEQ ID NO: 196114 - DNA, 10 bp, Unknown
  misc_feature (1)..( 10): Result.006 file - promoters50/5662921
tattttaaaa

SEQ ID NO: 196115 - DNA, 11 bp, Unknown
  misc_feature (1)..( 11): Result.006 file - promoters50/5662921
ttaatttcaat

SEQ ID NO: 196116 - DNA, 11 bp, Unknown
  misc_feature (1)..( 11): Result.006 file - promoters50/5662921
aaaatttcaaa

SEQ ID NO: 196117 - DNA, 11 bp, Unknown
  misc_feature (1)..( 11): Result.006 file - promoters50/5662921
ctaatttccaa

SEQ ID NO: 196118 - DNA, 11 bp, Unknown
  misc_feature (1)..( 11): Result.006 file - promoters50/5662921
ctattttccaa

SEQ ID NO: 196119 - DNA, 11 bp, Unknown
  misc_feature (1)..( 11): Result.006 file - promoters50/5662921
atcatttcaca

SEQ ID NO: 196120 - DNA, 11 bp, Unknown
  misc_feature (1)..( 11): Result.006 file - promoters50/5662945
ctcattccaaa

SEQ ID NO: 196121 - DNA, 7 bp, Unknown
  misc_feature (1)..( 7): Result.006 file - promoters50/5662945
aattgat

SEQ ID NO: 196122 - DNA, 7 bp, Unknown
  misc_feature (1)..( 7): Result.006 file - promoters50/5662945
aattgag

SEQ ID NO: 196123 - DNA, 7 bp, Unknown
  misc_feature (1)..( 7): Result.006 file - promoters50/5662945
cattgat

SEQ ID NO: 196124 - DNA, 7 bp, Unknown
  misc_feature (1)..( 7): Result.006 file - promoters50/5662945
ccaagat

SEQ ID NO: 196125 - DNA, 7 bp, Unknown
  misc_feature (1)..( 7): Result.006 file - promoters50/5662945
ccaagaa

SEQ ID NO: 196126 - DNA, 7 bp, Unknown
  misc_feature (1)..( 7): Result.006 file - promoters50/5662945
ccaagaa

SEQ ID NO: 196127 - DNA, 8 bp, Unknown
  misc_feature (1)..( 8): Result.006 file - promoters50/5662945
tttgtttg

SEQ ID NO: 196128 - DNA, 8 bp, Unknown
  misc_feature (1)..( 8): Result.006 file - promoters50/5662945
attgtttg

SEQ ID NO: 196129 - DNA, 8 bp, Unknown
  misc_feature (1)..( 8): Result.006 file - promoters50/5662948
attatttg

SEQ ID NO: 196130 - DNA, 17 bp, Unknown
  misc_feature (1)..( 17): Result.006 file - promoters50/5662948
gactattgtggttttgt

SEQ ID NO: 196131 - DNA, 17 bp, Unknown
  misc_feature (1)..( 17): Result.006 file - promoters50/5662948
tgggccgatggttttgt

SEQ ID NO: 196132 - DNA, 17 bp, Unknown
  misc_feature (1)..( 17): Result.006 file - promoters50/5662948
cacagatgtagttggcc

SEQ ID NO: 196133 - DNA, 17 bp, Unknown
  misc_feature (1)..( 17): Result.006 file - promoters50/5662948
atttgatgttgtttgtt

SEQ ID NO: 196134 - DNA, 17 bp, Unknown
  misc_feature (1)..( 17): Result.006 file - promoters50/5662948
aacttatgtcgttggtg

SEQ ID NO: 196135 - DNA, 17 bp, Unknown
  misc_feature (1)..( 17): Result.006 file - promoters50/5662948
tggttgggtagttttat

SEQ ID NO: 196136 - DNA, 17 bp, Unknown
  misc_feature (1)..( 17): Result.006 file - promoters50/5662963
attggatattggttatt

SEQ ID NO: 196137 - DNA, 7 bp, Unknown
  misc_feature (1)..( 7): Result.006 file - promoters50/5662963
tttgtag

SEQ ID NO: 196138 - DNA, 7 bp, Unknown
  misc_feature (1)..( 7): Result.006 file - promoters50/5662963
tttgtat

SEQ ID NO: 196139 - DNA, 7 bp, Unknown
  misc_feature (1)..( 7): Result.006 file - promoters50/5662967
tttgtat

SEQ ID NO: 196140 - DNA, 15 bp, Unknown
  misc_feature (1)..( 15): Result.006 file - promoters50/5662967
gttgttaataaattt

SEQ ID NO: 196141 - DNA, 15 bp, Unknown
  misc_feature (1)..( 15): Result.006 file - promoters50/5662967
tccactaagaaacat

SEQ ID NO: 196142 - DNA, 15 bp, Unknown
  misc_feature (1)..( 15): Result.006 file - promoters50/5662967
gttgataataaagat

SEQ ID NO: 196143 - DNA, 15 bp, Unknown
  misc_feature (1)..( 15): Result.006 file - promoters50/5662967
taaattaacaaaaca

SEQ ID NO: 196144 - DNA, 15 bp, Unknown
  misc_feature (1)..( 15): Result.006 file - promoters50/5662967
aaaaataagaatgtc

SEQ ID NO: 196145 - DNA, 15 bp, Unknown
  misc_feature (1)..( 15): Result.006 file - promoters50/5662967
atagataagacgaag

SEQ ID NO: 196146 - DNA, 15 bp, Unknown
  misc_feature (1)..( 15): Result.006 file - promoters50/5662967
attcgtgacaaaaca

SEQ ID NO: 196147 - DNA, 11 bp, Unknown
  misc_feature (1)..( 11): Result.006 file - promoters50/5662967
aatatattgaa

SEQ ID NO: 196148 - DNA, 11 bp, Unknown
  misc_feature (1)..( 11): Result.006 file - promoters50/5662967
ggtatattatt

SEQ ID NO: 196149 - DNA, 11 bp, Unknown
  misc_feature (1)..( 11): Result.006 file - promoters50/5662967
aatacatttca

SEQ ID NO: 196150 - DNA, 11 bp, Unknown
  misc_feature (1)..( 11): Result.006 file - promoters50/5662967
aatataatatg

SEQ ID NO: 196151 - DNA, 11 bp, Unknown
  misc_feature (1)..( 11): Result.006 file - promoters50/5662967
gataaaatgta

SEQ ID NO: 196152 - DNA, 11 bp, Unknown
  misc_feature (1)..( 11): Result.006 file - promoters50/5662967
cctataatatg

SEQ ID NO: 196153 - DNA, 14 bp, Unknown
  misc_feature (1)..( 14): Result.006 file - promoters50/5662967
ctattaaagtcaca

SEQ ID NO: 196154 - DNA, 14 bp, Unknown
  misc_feature (1)..( 14): Result.006 file - promoters50/5662967
taaacaaaatcaaa

SEQ ID NO: 196155 - DNA, 14 bp, Unknown
  misc_feature (1)..( 14): Result.006 file - promoters50/5662967
caagaaaactcatt

SEQ ID NO: 196156 - DNA, 14 bp, Unknown
  misc_feature (1)..( 14): Result.006 file - promoters50/5662967
aaaaaaaaaacaaa

SEQ ID NO: 196157 - DNA, 14 bp, Unknown
  misc_feature (1)..( 14): Result.006 file - promoters50/5662967
ccaacaaacaacca

SEQ ID NO: 196158 - DNA, 14 bp, Unknown
  misc_feature (1)..( 14): Result.006 file - promoters50/5662967
tcaaaaaaaaaaaa

SEQ ID NO: 196159 - DNA, 10 bp, Unknown
  misc_feature (1)..( 10): Result.006 file - promoters50/5662967
ttataaacac

SEQ ID NO: 196160 - DNA, 10 bp, Unknown
  misc_feature (1)..( 10): Result.006 file - promoters50/5662967
atctaaacac

SEQ ID NO: 196161 - DNA, 10 bp, Unknown
  misc_feature (1)..( 10): Result.006 file - promoters50/5662967
aagtaaacaa

SEQ ID NO: 196162 - DNA, 10 bp, Unknown
  misc_feature (1)..( 10): Result.006 file - promoters50/5662967
aaataaaact

SEQ ID NO: 196163 - DNA, 10 bp, Unknown
  misc_feature (1)..( 10): Result.006 file - promoters50/5662967
aaagaaacgg

SEQ ID NO: 196164 - DNA, 10 bp, Unknown
  misc_feature (1)..( 10): Result.006 file - promoters50/5662967
aaaaaaaaaa

SEQ ID NO: 196165 - DNA, 10 bp, Unknown
  misc_feature (1)..( 10): Result.006 file - promoters50/5662967
aaataacgca

SEQ ID NO: 196166 - DNA, 10 bp, Unknown
  misc_feature (1)..( 10): Result.006 file - promoters50/5662967
taataaaaat

SEQ ID NO: 196167 - DNA, 10 bp, Unknown
  misc_feature (1)..( 10): Result.006 file - promoters50/5662967
cgttaaaaat

SEQ ID NO: 196168 - DNA, 10 bp, Unknown
  misc_feature (1)..( 10): Result.006 file - promoters50/5662967
aaattaaaat

SEQ ID NO: 196169 - DNA, 10 bp, Unknown
  misc_feature (1)..( 10): Result.006 file - promoters50/5662967
agataaaatg

SEQ ID NO: 196170 - DNA, 10 bp, Unknown
  misc_feature (1)..( 10): Result.006 file - promoters50/5662967
aaattaatag

SEQ ID NO: 196171 - DNA, 10 bp, Unknown
  misc_feature (1)..( 10): Result.006 file - promoters50/5662967
cagtaaaaag

SEQ ID NO: 196172 - DNA, 14 bp, Unknown
  misc_feature (1)..( 14): Result.006 file - promoters50/5662967
aaccggtaaactca

SEQ ID NO: 196173 - DNA, 14 bp, Unknown
  misc_feature (1)..( 14): Result.006 file - promoters50/5662967
atttattaaactat

SEQ ID NO: 196174 - DNA, 14 bp, Unknown
  misc_feature (1)..( 14): Result.006 file - promoters50/5662967
tatatataaaacat

SEQ ID NO: 196175 - DNA, 14 bp, Unknown
  misc_feature (1)..( 14): Result.006 file - promoters50/5662967
tttatttattcggg

SEQ ID NO: 196176 - DNA, 14 bp, Unknown
  misc_feature (1)..( 14): Result.006 file - promoters50/5662967
attatatatagaaa

SEQ ID NO: 196177 - DNA, 14 bp, Unknown
  misc_feature (1)..( 14): Result.006 file - promoters50/5662992
gccatataaataga

SEQ ID NO: 196178 - DNA, 12 bp, Unknown
  misc_feature (1)..( 12): Result.006 file - promoters50/5662992
taactaatttaa

SEQ ID NO: 196179 - DNA, 12 bp, Unknown
  misc_feature (1)..( 12): Result.006 file - promoters50/5662992
aaacaaatgtaa

SEQ ID NO: 196180 - DNA, 12 bp, Unknown
  misc_feature (1)..( 12): Result.006 file - promoters50/5662992
ttcacaatttac

SEQ ID NO: 196181 - DNA, 12 bp, Unknown
  misc_feature (1)..( 12): Result.006 file - promoters50/5662992
aaagaaacaata

SEQ ID NO: 196182 - DNA, 9 bp, Unknown
  misc_feature (1)..( 9): Result.006 file - promoters50/5662992
aaagtaact

SEQ ID NO: 196183 - DNA, 9 bp, Unknown
  misc_feature (1)..( 9): Result.006 file - promoters50/5662992
aatgtaact

SEQ ID NO: 196184 - DNA, 9 bp, Unknown
  misc_feature (1)..( 9): Result.006 file - promoters50/5662992
aaagaaaca

SEQ ID NO: 196185 - DNA, 7 bp, Unknown
  misc_feature (1)..( 7): Result.006 file - promoters50/5662992
cgaaaat

SEQ ID NO: 196186 - DNA, 7 bp, Unknown
  misc_feature (1)..( 7): Result.006 file - promoters50/5662992
cgaaaaa

SEQ ID NO: 196187 - DNA, 7 bp, Unknown
  misc_feature (1)..( 7): Result.006 file - promoters50/5662992
tgaaaat

SEQ ID NO: 196188 - DNA, 8 bp, Unknown
  misc_feature (1)..( 8): Result.006 file - promoters50/5662992
gaaaatat

SEQ ID NO: 196189 - DNA, 8 bp, Unknown
  misc_feature (1)..( 8): Result.006 file - promoters50/5662992
caaattat

SEQ ID NO: 196190 - DNA, 8 bp, Unknown
  misc_feature (1)..( 8): Result.006 file - promoters50/5662992
gaaaattt

SEQ ID NO: 196191 - DNA, 7 bp, Unknown
  misc_feature (1)..( 7): Result.006 file - promoters50/5662992
ttatata

SEQ ID NO: 196192 - DNA, 7 bp, Unknown
  misc_feature (1)..( 7): Result.006 file - promoters50/5662992
atatata

SEQ ID NO: 196193 - DNA, 7 bp, Unknown
  misc_feature (1)..( 7): Result.006 file - promoters50/5662992
ttatata

SEQ ID NO: 196194 - DNA, 13 bp, Unknown
  misc_feature (1)..( 13): Result.006 file - promoters50/5662992
taattcgaaataa

SEQ ID NO: 196195 - DNA, 13 bp, Unknown
  misc_feature (1)..( 13): Result.006 file - promoters50/5662992
taattagaaaaaa

SEQ ID NO: 196196 - DNA, 13 bp, Unknown
  misc_feature (1)..( 13): Result.006 file - promoters50/5662992
atcttaaaaaaaa

SEQ ID NO: 196197 - DNA, 8 bp, Unknown
  misc_feature (1)..( 8): Result.006 file - promoters50/5662992
gttttaaa

SEQ ID NO: 196198 - DNA, 8 bp, Unknown
  misc_feature (1)..( 8): Result.006 file - promoters50/5662992
attttaaa

SEQ ID NO: 196199 - DNA, 8 bp, Unknown
  misc_feature (1)..( 8): Result.006 file - promoters50/5662992
attttact

SEQ ID NO: 196200 - DNA, 11 bp, Unknown
  misc_feature (1)..( 11): Result.006 file - promoters50/5662992
atactaactag

SEQ ID NO: 196201 - DNA, 11 bp, Unknown
  misc_feature (1)..( 11): Result.006 file - promoters50/5662992
atattaatatc

SEQ ID NO: 196202 - DNA, 11 bp, Unknown
  misc_feature (1)..( 11): Result.006 file - promoters50/5662992
acattaatatc

SEQ ID NO: 196203 - DNA, 11 bp, Unknown
  misc_feature (1)..( 11): Result.006 file - promoters50/5662992
ttcgaaataat

SEQ ID NO: 196204 - DNA, 11 bp, Unknown
  misc_feature (1)..( 11): Result.006 file - promoters50/5662992
ttaaaaaaaat

SEQ ID NO: 196205 - DNA, 11 bp, Unknown
  misc_feature (1)..( 11): Result.006 file - promoters50/5662992
ttagaaaaaag

SEQ ID NO: 196206 - DNA, 10 bp, Unknown
  misc_feature (1)..( 10): Result.006 file - promoters50/5662992
ttctttttca

SEQ ID NO: 196207 - DNA, 10 bp, Unknown
  misc_feature (1)..( 10): Result.006 file - promoters50/5662992
ttcgtttgat

SEQ ID NO: 196208 - DNA, 10 bp, Unknown
  misc_feature (1)..( 10): Result.006 file - promoters50/5663017
aactttttca

SEQ ID NO: 196209 - DNA, 7 bp, Unknown
  misc_feature (1)..( 7): Result.006 file - promoters50/5663017
catgaag

SEQ ID NO: 196210 - DNA, 7 bp, Unknown
  misc_feature (1)..( 7): Result.006 file - promoters50/5663017
catgaaa

SEQ ID NO: 196211 - DNA, 7 bp, Unknown
  misc_feature (1)..( 7): Result.006 file - promoters50/5663017
catcaag

SEQ ID NO: 196212 - DNA, 9 bp, Unknown
  misc_feature (1)..( 9): Result.006 file - promoters50/5663017
cagaattta

SEQ ID NO: 196213 - DNA, 9 bp, Unknown
  misc_feature (1)..( 9): Result.006 file - promoters50/5663017
accaattta

SEQ ID NO: 196214 - DNA, 9 bp, Unknown
  misc_feature (1)..( 9): Result.006 file - promoters50/5663017
cagacttta

SEQ ID NO: 196215 - DNA, 10 bp, Unknown
  misc_feature (1)..( 10): Result.006 file - promoters50/5663017
gatgatcgaa

SEQ ID NO: 196216 - DNA, 10 bp, Unknown
  misc_feature (1)..( 10): Result.006 file - promoters50/5663017
gcagatggaa

SEQ ID NO: 196217 - DNA, 10 bp, Unknown
  misc_feature (1)..( 10): Result.006 file - promoters50/5663028
tgggattttt

SEQ ID NO: 196218 - DNA, 7 bp, Unknown
  misc_feature (1)..( 7): Result.006 file - promoters50/5663028
tcaaaaa

SEQ ID NO: 196219 - DNA, 7 bp, Unknown
  misc_feature (1)..( 7): Result.006 file - promoters50/5663028
acaaaaa

SEQ ID NO: 196220 - DNA, 7 bp, Unknown
  misc_feature (1)..( 7): Result.006 file - promoters50/5663030
acacaaa

SEQ ID NO: 196221 - DNA, 9 bp, Unknown
  misc_feature (1)..( 9): Result.006 file - promoters50/5663030
gattgcttt

SEQ ID NO: 196222 - DNA, 9 bp, Unknown
  misc_feature (1)..( 9): Result.006 file - promoters50/5663030
gcttgcttt

SEQ ID NO: 196223 - DNA, 9 bp, Unknown
  misc_feature (1)..( 9): Result.006 file - promoters50/5663030
gcttccttc

SEQ ID NO: 196224 - DNA, 9 bp, Unknown
  misc_feature (1)..( 9): Result.006 file - promoters50/5663030
aagaaaatc

SEQ ID NO: 196225 - DNA, 9 bp, Unknown
  misc_feature (1)..( 9): Result.006 file - promoters50/5663030
aagaaaccg

SEQ ID NO: 196226 - DNA, 9 bp, Unknown
  misc_feature (1)..( 9): Result.006 file - promoters50/5663034
tagataccg

SEQ ID NO: 196227 - DNA, 14 bp, Unknown
  misc_feature (1)..( 14): Result.006 file - promoters50/5663034
aactcattttctta

SEQ ID NO: 196228 - DNA, 14 bp, Unknown
  misc_feature (1)..( 14): Result.006 file - promoters50/5663034
ctctctttttatta

SEQ ID NO: 196229 - DNA, 14 bp, Unknown
  misc_feature (1)..( 14): Result.006 file - promoters50/5663034
aactgattgacacg

SEQ ID NO: 196230 - DNA, 10 bp, Unknown
  misc_feature (1)..( 10): Result.006 file - promoters50/5663034
aattttaggt

SEQ ID NO: 196231 - DNA, 10 bp, Unknown
  misc_feature (1)..( 10): Result.006 file - promoters50/5663034
aatcttatct

SEQ ID NO: 196232 - DNA, 10 bp, Unknown
  misc_feature (1)..( 10): Result.006 file - promoters50/5663034
tgtttttggt

SEQ ID NO: 196233 - DNA, 8 bp, Unknown
  misc_feature (1)..( 8): Result.006 file - promoters50/5663034
attttgtt

SEQ ID NO: 196234 - DNA, 8 bp, Unknown
  misc_feature (1)..( 8): Result.006 file - promoters50/5663034
gttttgta

SEQ ID NO: 196235 - DNA, 8 bp, Unknown
  misc_feature (1)..( 8): Result.006 file - promoters50/5663050
attttgtt

SEQ ID NO: 196236 - DNA, 8 bp, Unknown
  misc_feature (1)..( 8): Result.006 file - promoters50/5663050
ctcaaatt

SEQ ID NO: 196237 - DNA, 8 bp, Unknown
  misc_feature (1)..( 8): Result.006 file - promoters50/5663050
ctcacatt

SEQ ID NO: 196238 - DNA, 8 bp, Unknown
  misc_feature (1)..( 8): Result.006 file - promoters50/5663050
aacaaatt

SEQ ID NO: 196239 - DNA, 8 bp, Unknown
  misc_feature (1)..( 8): Result.006 file - promoters50/5663050
atcagatt

SEQ ID NO: 196240 - DNA, 8 bp, Unknown
  misc_feature (1)..( 8): Result.006 file - promoters50/5663050
cttaatta

SEQ ID NO: 196241 - DNA, 8 bp, Unknown
  misc_feature (1)..( 8): Result.006 file - promoters50/5663050
cttattta

SEQ ID NO: 196242 - DNA, 8 bp, Unknown
  misc_feature (1)..( 8): Result.006 file - promoters50/5663050
cttttttc

SEQ ID NO: 196243 - DNA, 7 bp, Unknown
  misc_feature (1)..( 7): Result.006 file - promoters50/5663050
tatttaa

SEQ ID NO: 196244 - DNA, 7 bp, Unknown
  misc_feature (1)..( 7): Result.006 file - promoters50/5663050
tatttat

SEQ ID NO: 196245 - DNA, 7 bp, Unknown
  misc_feature (1)..( 7): Result.006 file - promoters50/5663054
catttat

SEQ ID NO: 196246 - DNA, 9 bp, Unknown
  misc_feature (1)..( 9): Result.006 file - promoters50/5663054
ttcacaaat

SEQ ID NO: 196247 - DNA, 9 bp, Unknown
  misc_feature (1)..( 9): Result.006 file - promoters50/5663054
gcaacaaat

SEQ ID NO: 196248 - DNA, 9 bp, Unknown
  misc_feature (1)..( 9): Result.006 file - promoters50/5663054
ttcacaaaa

SEQ ID NO: 196249 - DNA, 12 bp, Unknown
  misc_feature (1)..( 12): Result.006 file - promoters50/5663054
aaactcactgtt

SEQ ID NO: 196250 - DNA, 12 bp, Unknown
  misc_feature (1)..( 12): Result.006 file - promoters50/5663054
aaattcaaagat

SEQ ID NO: 196251 - DNA, 12 bp, Unknown
  misc_feature (1)..( 12): Result.006 file - promoters50/5663054
ttattcaaagat

SEQ ID NO: 196252 - DNA, 8 bp, Unknown
  misc_feature (1)..( 8): Result.006 file - promoters50/5663054
aaatatga

SEQ ID NO: 196253 - DNA, 8 bp, Unknown
  misc_feature (1)..( 8): Result.006 file - promoters50/5663054
aaagatga

SEQ ID NO: 196254 - DNA, 8 bp, Unknown
  misc_feature (1)..( 8): Result.006 file - promoters50/5663054
aaagattt

SEQ ID NO: 196255 - DNA, 7 bp, Unknown
  misc_feature (1)..( 7): Result.006 file - promoters50/5663054
ttaatta

SEQ ID NO: 196256 - DNA, 7 bp, Unknown
  misc_feature (1)..( 7): Result.006 file - promoters50/5663054
ataatta

SEQ ID NO: 196257 - DNA, 7 bp, Unknown
  misc_feature (1)..( 7): Result.006 file - promoters50/5663054
ttaatta

SEQ ID NO: 196258 - DNA, 7 bp, Unknown
  misc_feature (1)..( 7): Result.006 file - promoters50/5663054
ataattc

SEQ ID NO: 196259 - DNA, 10 bp, Unknown
  misc_feature (1)..( 10): Result.006 file - promoters50/5663054
gatttaaaga

SEQ ID NO: 196260 - DNA, 10 bp, Unknown
  misc_feature (1)..( 10): Result.006 file - promoters50/5663054
gatttatgta

SEQ ID NO: 196261 - DNA, 10 bp, Unknown
  misc_feature (1)..( 10): Result.006 file - promoters50/5663054
aatttctgta

SEQ ID NO: 196262 - DNA, 7 bp, Unknown
  misc_feature (1)..( 7): Result.006 file - promoters50/5663054
ccctatt

SEQ ID NO: 196263 - DNA, 7 bp, Unknown
  misc_feature (1)..( 7): Result.006 file - promoters50/5663054
ccctata

SEQ ID NO: 196264 - DNA, 7 bp, Unknown
  misc_feature (1)..( 7): Result.006 file - promoters50/5663054
gcctata

SEQ ID NO: 196265 - DNA, 11 bp, Unknown
  misc_feature (1)..( 11): Result.006 file - promoters50/5663054
cattatcaaaa

SEQ ID NO: 196266 - DNA, 11 bp, Unknown
  misc_feature (1)..( 11): Result.006 file - promoters50/5663054
cattatgaaat

SEQ ID NO: 196267 - DNA, 11 bp, Unknown
  misc_feature (1)..( 11): Result.006 file - promoters50/5663054
aattagcaaaa

SEQ ID NO: 196268 - DNA, 8 bp, Unknown
  misc_feature (1)..( 8): Result.006 file - promoters50/5663054
tttaacat

SEQ ID NO: 196269 - DNA, 8 bp, Unknown
  misc_feature (1)..( 8): Result.006 file - promoters50/5663054
ttttacag

SEQ ID NO: 196270 - DNA, 8 bp, Unknown
  misc_feature (1)..( 8): Result.006 file - promoters50/5663054
ctttccag

SEQ ID NO: 196271 - DNA, 10 bp, Unknown
  misc_feature (1)..( 10): Result.006 file - promoters50/5663054
aacattcaaa

SEQ ID NO: 196272 - DNA, 10 bp, Unknown
  misc_feature (1)..( 10): Result.006 file - promoters50/5663054
gttattaaaa

SEQ ID NO: 196273 - DNA, 10 bp, Unknown
  misc_feature (1)..( 10): Result.006 file - promoters50/5663054
aactttcacg

SEQ ID NO: 196274 - DNA, 9 bp, Unknown
  misc_feature (1)..( 9): Result.006 file - promoters50/5663054
tctataaaa

SEQ ID NO: 196275 - DNA, 9 bp, Unknown
  misc_feature (1)..( 9): Result.006 file - promoters50/5663054
cctataaaa

SEQ ID NO: 196276 - DNA, 9 bp, Unknown
  misc_feature (1)..( 9): Result.006 file - promoters50/5663061
cctatatta

SEQ ID NO: 196277 - DNA, 12 bp, Unknown
  misc_feature (1)..( 12): Result.006 file - promoters50/5663061
gagttcttcaca

SEQ ID NO: 196278 - DNA, 12 bp, Unknown
  misc_feature (1)..( 12): Result.006 file - promoters50/5663061
gagtttttctgt

SEQ ID NO: 196279 - DNA, 12 bp, Unknown
  misc_feature (1)..( 12): Result.006 file - promoters50/5663069
cttatctccaca

SEQ ID NO: 196280 - DNA, 11 bp, Unknown
  misc_feature (1)..( 11): Result.006 file - promoters50/5663069
ttttcgaaaaa

SEQ ID NO: 196281 - DNA, 11 bp, Unknown
  misc_feature (1)..( 11): Result.006 file - promoters50/5663069
ttttcgaaaaa

SEQ ID NO: 196282 - DNA, 11 bp, Unknown
  misc_feature (1)..( 11): Result.006 file - promoters50/5663069
ctttcgacatt

SEQ ID NO: 196283 - DNA, 10 bp, Unknown
  misc_feature (1)..( 10): Result.006 file - promoters50/5663069
gtccaaaaat

SEQ ID NO: 196284 - DNA, 10 bp, Unknown
  misc_feature (1)..( 10): Result.006 file - promoters50/5663069
gtctaaaaac

SEQ ID NO: 196285 - DNA, 10 bp, Unknown
  misc_feature (1)..( 10): Result.006 file - promoters50/5663093
ataaaaaaat

SEQ ID NO: 196286 - DNA, 12 bp, Unknown
  misc_feature (1)..( 12): Result.006 file - promoters50/5663093
gtttatcaacct

SEQ ID NO: 196287 - DNA, 12 bp, Unknown
  misc_feature (1)..( 12): Result.006 file - promoters50/5663093
gttgatctttca

SEQ ID NO: 196288 - DNA, 12 bp, Unknown
  misc_feature (1)..( 12): Result.006 file - promoters50/5663093
attgatgtttca

SEQ ID NO: 196289 - DNA, 7 bp, Unknown
  misc_feature (1)..( 7): Result.006 file - promoters50/5663093
aaagttg

SEQ ID NO: 196290 - DNA, 7 bp, Unknown
  misc_feature (1)..( 7): Result.006 file - promoters50/5663093
aaagtta

SEQ ID NO: 196291 - DNA, 7 bp, Unknown
  misc_feature (1)..( 7): Result.006 file - promoters50/5663093
aaatttg

SEQ ID NO: 196292 - DNA, 8 bp, Unknown
  misc_feature (1)..( 8): Result.006 file - promoters50/5663093
gttactta

SEQ ID NO: 196293 - DNA, 8 bp, Unknown
  misc_feature (1)..( 8): Result.006 file - promoters50/5663093
attacttg

SEQ ID NO: 196294 - DNA, 8 bp, Unknown
  misc_feature (1)..( 8): Result.006 file - promoters50/5663093
attccttg

SEQ ID NO: 196295 - DNA, 10 bp, Unknown
  misc_feature (1)..( 10): Result.006 file - promoters50/5663093
atttatggtt

SEQ ID NO: 196296 - DNA, 10 bp, Unknown
  misc_feature (1)..( 10): Result.006 file - promoters50/5663093
atttatgtgt

SEQ ID NO: 196297 - DNA, 10 bp, Unknown
  misc_feature (1)..( 10): Result.006 file - promoters50/5663093
aattaagtgt

SEQ ID NO: 196298 - DNA, 7 bp, Unknown
  misc_feature (1)..( 7): Result.006 file - promoters50/5663093
tgacaat

SEQ ID NO: 196299 - DNA, 7 bp, Unknown
  misc_feature (1)..( 7): Result.006 file - promoters50/5663093
tgaaaat

SEQ ID NO: 196300 - DNA, 7 bp, Unknown
  misc_feature (1)..( 7): Result.006 file - promoters50/5663093
ggaaaat

SEQ ID NO: 196301 - DNA, 12 bp, Unknown
  misc_feature (1)..( 12): Result.006 file - promoters50/5663093
ttaagagtacac

SEQ ID NO: 196302 - DNA, 12 bp, Unknown
  misc_feature (1)..( 12): Result.006 file - promoters50/5663093
ttaagtgtaaac

SEQ ID NO: 196303 - DNA, 12 bp, Unknown
  misc_feature (1)..( 12): Result.006 file - promoters50/5663093
accggtggaaac

SEQ ID NO: 196304 - DNA, 12 bp, Unknown
  misc_feature (1)..( 12): Result.006 file - promoters50/5663093
ttatgtgtcttc

SEQ ID NO: 196305 - DNA, 7 bp, Unknown
  misc_feature (1)..( 7): Result.006 file - promoters50/5663093
atgatgt

SEQ ID NO: 196306 - DNA, 7 bp, Unknown
  misc_feature (1)..( 7): Result.006 file - promoters50/5663093
atgatgc

SEQ ID NO: 196307 - DNA, 7 bp, Unknown
  misc_feature (1)..( 7): Result.006 file - promoters50/5663093
ttgatgt

SEQ ID NO: 196308 - DNA, 8 bp, Unknown
  misc_feature (1)..( 8): Result.006 file - promoters50/5663093
tgggattt

SEQ ID NO: 196309 - DNA, 8 bp, Unknown
  misc_feature (1)..( 8): Result.006 file - promoters50/5663093
tggaattg

SEQ ID NO: 196310 - DNA, 8 bp, Unknown
  misc_feature (1)..( 8): Result.006 file - promoters50/5663093
tgggcttt

SEQ ID NO: 196311 - DNA, 7 bp, Unknown
  misc_feature (1)..( 7): Result.006 file - promoters50/5663093
acattgc

SEQ ID NO: 196312 - DNA, 7 bp, Unknown
  misc_feature (1)..( 7): Result.006 file - promoters50/5663093
ccattgc

SEQ ID NO: 196313 - DNA, 7 bp, Unknown
  misc_feature (1)..( 7): Result.006 file - promoters50/5663097
acattga

SEQ ID NO: 196314 - DNA, 7 bp, Unknown
  misc_feature (1)..( 7): Result.006 file - promoters50/5663097
ataaact

SEQ ID NO: 196315 - DNA, 7 bp, Unknown
  misc_feature (1)..( 7): Result.006 file - promoters50/5663097
ataaacg

SEQ ID NO: 196316 - DNA, 7 bp, Unknown
  misc_feature (1)..( 7): Result.006 file - promoters50/5663097
ataaaaa

SEQ ID NO: 196317 - DNA, 15 bp, Unknown
  misc_feature (1)..( 15): Result.006 file - promoters50/5663097
ctcctatatataaag

SEQ ID NO: 196318 - DNA, 15 bp, Unknown
  misc_feature (1)..( 15): Result.006 file - promoters50/5663097
aacgtatatataaag

SEQ ID NO: 196319 - DNA, 15 bp, Unknown
  misc_feature (1)..( 15): Result.006 file - promoters50/5663116
ctcatataaatacat

SEQ ID NO: 196320 - DNA, 13 bp, Unknown
  misc_feature (1)..( 13): Result.006 file - promoters50/5663116
ttttcattttatc

SEQ ID NO: 196321 - DNA, 13 bp, Unknown
  misc_feature (1)..( 13): Result.006 file - promoters50/5663116
cattcgtttagtc

SEQ ID NO: 196322 - DNA, 13 bp, Unknown
  misc_feature (1)..( 13): Result.006 file - promoters50/5663116
cattagtttcctg

SEQ ID NO: 196323 - DNA, 13 bp, Unknown
  misc_feature (1)..( 13): Result.006 file - promoters50/5663116
cccaagtgtccta

SEQ ID NO: 196324 - DNA, 11 bp, Unknown
  misc_feature (1)..( 11): Result.006 file - promoters50/5663116
ttaatttcctg

SEQ ID NO: 196325 - DNA, 13 bp, Unknown
  misc_feature (1)..( 13): Result.006 file - promoters50/5663116
atttactttggaa

SEQ ID NO: 196326 - DNA, 11 bp, Unknown
  misc_feature (1)..( 11): Result.006 file - promoters50/5663116
tttaattaatt

SEQ ID NO: 196327 - DNA, 11 bp, Unknown
  misc_feature (1)..( 11): Result.006 file - promoters50/5663116
ttaaatgaata

SEQ ID NO: 196328 - DNA, 11 bp, Unknown
  misc_feature (1)..( 11): Result.006 file - promoters50/5663116
tgtaatttatt

SEQ ID NO: 196329 - DNA, 11 bp, Unknown
  misc_feature (1)..( 11): Result.006 file - promoters50/5663116
actaattatgt

SEQ ID NO: 196330 - DNA, 11 bp, Unknown
  misc_feature (1)..( 11): Result.006 file - promoters50/5663116
ttttattattc

SEQ ID NO: 196331 - DNA, 11 bp, Unknown
  misc_feature (1)..( 11): Result.006 file - promoters50/5663116
cataattttat

SEQ ID NO: 196332 - DNA, 14 bp, Unknown
  misc_feature (1)..( 14): Result.006 file - promoters50/5663116
ccaaatttatggtt

SEQ ID NO: 196333 - DNA, 14 bp, Unknown
  misc_feature (1)..( 14): Result.006 file - promoters50/5663116
tgagatttatgttg

SEQ ID NO: 196334 - DNA, 14 bp, Unknown
  misc_feature (1)..( 14): Result.006 file - promoters50/5663116
agaattttctggtt

SEQ ID NO: 196335 - DNA, 14 bp, Unknown
  misc_feature (1)..( 14): Result.006 file - promoters50/5663116
ttaaatttacgctc

SEQ ID NO: 196336 - DNA, 14 bp, Unknown
  misc_feature (1)..( 14): Result.006 file - promoters50/5663116
aaagatgtatatca

SEQ ID NO: 196337 - DNA, 14 bp, Unknown
  misc_feature (1)..( 14): Result.006 file - promoters50/5663134
aaaaatgacaactt

SEQ ID NO: 196338 - DNA, 10 bp, Unknown
  misc_feature (1)..( 10): Result.006 file - promoters50/5663134
ttaaaataaa

SEQ ID NO: 196339 - DNA, 10 bp, Unknown
  misc_feature (1)..( 10): Result.006 file - promoters50/5663134
agaaaataaa

SEQ ID NO: 196340 - DNA, 10 bp, Unknown
  misc_feature (1)..( 10): Result.006 file - promoters50/5663138
ttataatagc

SEQ ID NO: 196341 - DNA, 14 bp, Unknown
  misc_feature (1)..( 14): Result.006 file - promoters50/5663138
acatcagaaaagat

SEQ ID NO: 196342 - DNA, 14 bp, Unknown
  misc_feature (1)..( 14): Result.006 file - promoters50/5663138
tttttctaaaagat

SEQ ID NO: 196343 - DNA, 14 bp, Unknown
  misc_feature (1)..( 14): Result.006 file - promoters50/5663138
tctactcaaaagag

SEQ ID NO: 196344 - DNA, 14 bp, Unknown
  misc_feature (1)..( 14): Result.006 file - promoters50/5663138
atcaggaaaaagaa

SEQ ID NO: 196345 - DNA, 14 bp, Unknown
  misc_feature (1)..( 14): Result.006 file - promoters50/5663138
gctaaacaaaaact

SEQ ID NO: 196346 - DNA, 14 bp, Unknown
  misc_feature (1)..( 14): Result.006 file - promoters50/5663138
gaaaaacaaaatgg

SEQ ID NO: 196347 - DNA, 16 bp, Unknown
  misc_feature (1)..( 16): Result.006 file - promoters50/5663138
gcaatttaatattcat

SEQ ID NO: 196348 - DNA, 16 bp, Unknown
  misc_feature (1)..( 16): Result.006 file - promoters50/5663138
ttgaatcaatatttta

SEQ ID NO: 196349 - DNA, 16 bp, Unknown
  misc_feature (1)..( 16): Result.006 file - promoters50/5663138
aggctataacattacc

SEQ ID NO: 196350 - DNA, 16 bp, Unknown
  misc_feature (1)..( 16): Result.006 file - promoters50/5663138
ttgattcaaaattctc

SEQ ID NO: 196351 - DNA, 16 bp, Unknown
  misc_feature (1)..( 16): Result.006 file - promoters50/5663138
cagacttaaaatctac

SEQ ID NO: 196352 - DNA, 16 bp, Unknown
  misc_feature (1)..( 16): Result.006 file - promoters50/5663142
tatatgtaatatcatt

SEQ ID NO: 196353 - DNA, 8 bp, Unknown
  misc_feature (1)..( 8): Result.006 file - promoters50/5663142
gaataatg

SEQ ID NO: 196354 - DNA, 8 bp, Unknown
  misc_feature (1)..( 8): Result.006 file - promoters50/5663142
taatgatg

SEQ ID NO: 196355 - DNA, 8 bp, Unknown
  misc_feature (1)..( 8): Result.006 file - promoters50/5663142
taatgacg

SEQ ID NO: 196356 - DNA, 8 bp, Unknown
  misc_feature (1)..( 8): Result.006 file - promoters50/5663142
aaataatt

SEQ ID NO: 196357 - DNA, 8 bp, Unknown
  misc_feature (1)..( 8): Result.006 file - promoters50/5663142
aaataacc

SEQ ID NO: 196358 - DNA, 8 bp, Unknown
  misc_feature (1)..( 8): Result.006 file - promoters50/5663142
aaataaaa

SEQ ID NO: 196359 - DNA, 11 bp, Unknown
  misc_feature (1)..( 11): Result.006 file - promoters50/5663142
tcatataacaa

SEQ ID NO: 196360 - DNA, 11 bp, Unknown
  misc_feature (1)..( 11): Result.006 file - promoters50/5663142
atatataataa

SEQ ID NO: 196361 - DNA, 11 bp, Unknown
  misc_feature (1)..( 11): Result.006 file - promoters50/5663142
tcatataatta

SEQ ID NO: 196362 - DNA, 11 bp, Unknown
  misc_feature (1)..( 11): Result.006 file - promoters50/5663142
tcaaatatggt

SEQ ID NO: 196363 - DNA, 11 bp, Unknown
  misc_feature (1)..( 11): Result.006 file - promoters50/5663142
aaaaataaata

SEQ ID NO: 196364 - DNA, 11 bp, Unknown
  misc_feature (1)..( 11): Result.006 file - promoters50/5663142
cagaataaaaa

SEQ ID NO: 196365 - DNA, 14 bp, Unknown
  misc_feature (1)..( 14): Result.006 file - promoters50/5663142
taaaataaggaatt

SEQ ID NO: 196366 - DNA, 14 bp, Unknown
  misc_feature (1)..( 14): Result.006 file - promoters50/5663142
acttataatgaatt

SEQ ID NO: 196367 - DNA, 14 bp, Unknown
  misc_feature (1)..( 14): Result.006 file - promoters50/5663142
actcataataaata

SEQ ID NO: 196368 - DNA, 14 bp, Unknown
  misc_feature (1)..( 14): Result.006 file - promoters50/5663142
tcatataatagtaa

SEQ ID NO: 196369 - DNA, 14 bp, Unknown
  misc_feature (1)..( 14): Result.006 file - promoters50/5663142
atttataatataat

SEQ ID NO: 196370 - DNA, 14 bp, Unknown
  misc_feature (1)..( 14): Result.006 file - promoters50/5663142
tcttttaattttct

SEQ ID NO: 196371 - DNA, 10 bp, Unknown
  misc_feature (1)..( 10): Result.006 file - promoters50/5663142
ataataaata

SEQ ID NO: 196372 - DNA, 10 bp, Unknown
  misc_feature (1)..( 10): Result.006 file - promoters50/5663142
ataaaaaata

SEQ ID NO: 196373 - DNA, 10 bp, Unknown
  misc_feature (1)..( 10): Result.006 file - promoters50/5663142
ttaataacaa

SEQ ID NO: 196374 - DNA, 10 bp, Unknown
  misc_feature (1)..( 10): Result.006 file - promoters50/5663142
caaataacca

SEQ ID NO: 196375 - DNA, 10 bp, Unknown
  misc_feature (1)..( 10): Result.006 file - promoters50/5663142
aaaatataat

SEQ ID NO: 196376 - DNA, 10 bp, Unknown
  misc_feature (1)..( 10): Result.006 file - promoters50/5663148
ggaaaaaatg

SEQ ID NO: 196377 - DNA, 10 bp, Unknown
  misc_feature (1)..( 10): Result.006 file - promoters50/5663148
tataagtgtt

SEQ ID NO: 196378 - DNA, 10 bp, Unknown
  misc_feature (1)..( 10): Result.006 file - promoters50/5663148
aagaagagtt

SEQ ID NO: 196379 - DNA, 10 bp, Unknown
  misc_feature (1)..( 10): Result.006 file - promoters50/5663148
tattagtgtt

SEQ ID NO: 196380 - DNA, 9 bp, Unknown
  misc_feature (1)..( 9): Result.006 file - promoters50/5663148
tctctaata

SEQ ID NO: 196381 - DNA, 9 bp, Unknown
  misc_feature (1)..( 9): Result.006 file - promoters50/5663148
tctcttata

SEQ ID NO: 196382 - DNA, 9 bp, Unknown
  misc_feature (1)..( 9): Result.006 file - promoters50/5663148
tatcttata

SEQ ID NO: 196383 - DNA, 8 bp, Unknown
  misc_feature (1)..( 8): Result.006 file - promoters50/5663148
tttatgca

SEQ ID NO: 196384 - DNA, 8 bp, Unknown
  misc_feature (1)..( 8): Result.006 file - promoters50/5663148
attaggca

SEQ ID NO: 196385 - DNA, 8 bp, Unknown
  misc_feature (1)..( 8): Result.006 file - promoters50/5663148
tttatggg

SEQ ID NO: 196386 - DNA, 10 bp, Unknown
  misc_feature (1)..( 10): Result.006 file - promoters50/5663148
caggtttatg

SEQ ID NO: 196387 - DNA, 10 bp, Unknown
  misc_feature (1)..( 10): Result.006 file - promoters50/5663148
cagatttatt

SEQ ID NO: 196388 - DNA, 10 bp, Unknown
  misc_feature (1)..( 10): Result.006 file - promoters50/5663151
tttctttatt

SEQ ID NO: 196389 - DNA, 10 bp, Unknown
  misc_feature (1)..( 10): Result.006 file - promoters50/5663151
aagaaatgat

SEQ ID NO: 196390 - DNA, 10 bp, Unknown
  misc_feature (1)..( 10): Result.006 file - promoters50/5663151
aagaaacgaa

SEQ ID NO: 196391 - DNA, 10 bp, Unknown
  misc_feature (1)..( 10): Result.006 file - promoters50/5663151
tagatatgat

SEQ ID NO: 196392 - DNA, 9 bp, Unknown
  misc_feature (1)..( 9): Result.006 file - promoters50/5663151
aaaacgcaa

SEQ ID NO: 196393 - DNA, 9 bp, Unknown
  misc_feature (1)..( 9): Result.006 file - promoters50/5663151
caaacccaa

SEQ ID NO: 196394 - DNA, 9 bp, Unknown
  misc_feature (1)..( 9): Result.006 file - promoters50/5663154
caaacctga

SEQ ID NO: 196395 - DNA, 11 bp, Unknown
  misc_feature (1)..( 11): Result.006 file - promoters50/5663154
ttttacttatt

SEQ ID NO: 196396 - DNA, 11 bp, Unknown
  misc_feature (1)..( 11): Result.006 file - promoters50/5663154
cttttctttgc

SEQ ID NO: 196397 - DNA, 11 bp, Unknown
  misc_feature (1)..( 11): Result.006 file - promoters50/5663154
ttttcctttat

SEQ ID NO: 196398 - DNA, 11 bp, Unknown
  misc_feature (1)..( 11): Result.006 file - promoters50/5663154
aactacatatt

SEQ ID NO: 196399 - DNA, 11 bp, Unknown
  misc_feature (1)..( 11): Result.006 file - promoters50/5663154
ataaacatatt

SEQ ID NO: 196400 - DNA, 11 bp, Unknown
  misc_feature (1)..( 11): Result.006 file - promoters50/5663154
ccaaaaataag

SEQ ID NO: 196401 - DNA, 10 bp, Unknown
  misc_feature (1)..( 10): Result.006 file - promoters50/5663154
ggatataatg

SEQ ID NO: 196402 - DNA, 10 bp, Unknown
  misc_feature (1)..( 10): Result.006 file - promoters50/5663154
aaatataaat

SEQ ID NO: 196403 - DNA, 10 bp, Unknown
  misc_feature (1)..( 10): Result.006 file - promoters50/5663154
aaagataaca

SEQ ID NO: 196404 - DNA, 11 bp, Unknown
  misc_feature (1)..( 11): Result.006 file - promoters50/5663154
ctttattaata

SEQ ID NO: 196405 - DNA, 11 bp, Unknown
  misc_feature (1)..( 11): Result.006 file - promoters50/5663154
acatgataact

SEQ ID NO: 196406 - DNA, 11 bp, Unknown
  misc_feature (1)..( 11): Result.006 file - promoters50/5663154
ttttcttaaac

SEQ ID NO: 196407 - DNA, 12 bp, Unknown
  misc_feature (1)..( 12): Result.006 file - promoters50/5663154
aaatgtgtgtac

SEQ ID NO: 196408 - DNA, 12 bp, Unknown
  misc_feature (1)..( 12): Result.006 file - promoters50/5663154
aaatgtttgttt

SEQ ID NO: 196409 - DNA, 12 bp, Unknown
  misc_feature (1)..( 12): Result.006 file - promoters50/5663154
gaatctttaaaa

SEQ ID NO: 196410 - DNA, 12 bp, Unknown
  misc_feature (1)..( 12): Result.006 file - promoters50/5663154
aaatttttaata

SEQ ID NO: 196411 - DNA, 12 bp, Unknown
  misc_feature (1)..( 12): Result.006 file - promoters50/5663154
acacttttgttt

SEQ ID NO: 196412 - DNA, 12 bp, Unknown
  misc_feature (1)..( 12): Result.006 file - promoters50/5663154
aattgtttaacg

SEQ ID NO: 196413 - DNA, 10 bp, Unknown
  misc_feature (1)..( 10): Result.006 file - promoters50/5663154
taattctttt

SEQ ID NO: 196414 - DNA, 10 bp, Unknown
  misc_feature (1)..( 10): Result.006 file - promoters50/5663154
gtattttttt

SEQ ID NO: 196415 - DNA, 10 bp, Unknown
  misc_feature (1)..( 10): Result.006 file - promoters50/5663154
atattttttt

SEQ ID NO: 196416 - DNA, 10 bp, Unknown
  misc_feature (1)..( 10): Result.006 file - promoters50/5663154
gaattcttta

SEQ ID NO: 196417 - DNA, 10 bp, Unknown
  misc_feature (1)..( 10): Result.006 file - promoters50/5663154
taattatttt

SEQ ID NO: 196418 - DNA, 10 bp, Unknown
  misc_feature (1)..( 10): Result.006 file - promoters50/5663162
atattattag

SEQ ID NO: 196419 - DNA, 8 bp, Unknown
  misc_feature (1)..( 8): Result.006 file - promoters50/5663162
ctcaatat

SEQ ID NO: 196420 - DNA, 8 bp, Unknown
  misc_feature (1)..( 8): Result.006 file - promoters50/5663162
ctcattat

SEQ ID NO: 196421 - DNA, 7 bp, Unknown
  misc_feature (1)..( 7): Result.006 file - promoters50/5663162
tcagtat

SEQ ID NO: 196422 - DNA, 12 bp, Unknown
  misc_feature (1)..( 12): Result.006 file - promoters50/5663162
taattaaaatta

SEQ ID NO: 196423 - DNA, 12 bp, Unknown
  misc_feature (1)..( 12): Result.006 file - promoters50/5663162
taatgaaagtta

SEQ ID NO: 196424 - DNA, 12 bp, Unknown
  misc_feature (1)..( 12): Result.006 file - promoters50/5663162
ttattcaaactt

SEQ ID NO: 196425 - DNA, 8 bp, Unknown
  misc_feature (1)..( 8): Result.006 file - promoters50/5663162
aaatctat

SEQ ID NO: 196426 - DNA, 8 bp, Unknown
  misc_feature (1)..( 8): Result.006 file - promoters50/5663162
aaatcttg

SEQ ID NO: 196427 - DNA, 8 bp, Unknown
  misc_feature (1)..( 8): Result.006 file - promoters50/5663162
aaagctat

SEQ ID NO: 196428 - DNA, 10 bp, Unknown
  misc_feature (1)..( 10): Result.006 file - promoters50/5663162
tcaaaaaaac

SEQ ID NO: 196429 - DNA, 10 bp, Unknown
  misc_feature (1)..( 10): Result.006 file - promoters50/5663162
ttaaaataac

SEQ ID NO: 196430 - DNA, 10 bp, Unknown
  misc_feature (1)..( 10): Result.006 file - promoters50/5663162
ttaagatata

SEQ ID NO: 196431 - DNA, 7 bp, Unknown
  misc_feature (1)..( 7): Result.006 file - promoters50/5663162
ttaaaaa

SEQ ID NO: 196432 - DNA, 7 bp, Unknown
  misc_feature (1)..( 7): Result.006 file - promoters50/5663162
ttaaaat

SEQ ID NO: 196433 - DNA, 7 bp, Unknown
  misc_feature (1)..( 7): Result.006 file - promoters50/5663162
ataaaaa

SEQ ID NO: 196434 - DNA, 7 bp, Unknown
  misc_feature (1)..( 7): Result.006 file - promoters50/5663162
tattaaa

SEQ ID NO: 196435 - DNA, 7 bp, Unknown
  misc_feature (1)..( 7): Result.006 file - promoters50/5663162
aattaaa

SEQ ID NO: 196436 - DNA, 7 bp, Unknown
  misc_feature (1)..( 7): Result.006 file - promoters50/5663170
aattaat

SEQ ID NO: 196437 - DNA, 10 bp, Unknown
  misc_feature (1)..( 10): Result.006 file - promoters50/5663170
ataagaataa

SEQ ID NO: 196438 - DNA, 10 bp, Unknown
  misc_feature (1)..( 10): Result.006 file - promoters50/5663170
ataacaataa

SEQ ID NO: 196439 - DNA, 10 bp, Unknown
  misc_feature (1)..( 10): Result.006 file - promoters50/5663170
ctaagcatat

SEQ ID NO: 196440 - DNA, 7 bp, Unknown
  misc_feature (1)..( 7): Result.006 file - promoters50/5663170
taaataa

SEQ ID NO: 196441 - DNA, 7 bp, Unknown
  misc_feature (1)..( 7): Result.006 file - promoters50/5663170
taagtaa

SEQ ID NO: 196442 - DNA, 7 bp, Unknown
  misc_feature (1)..( 7): Result.006 file - promoters50/5663170
taactaa

SEQ ID NO: 196443 - DNA, 9 bp, Unknown
  misc_feature (1)..( 9): Result.006 file - promoters50/5663170
aagagttta

SEQ ID NO: 196444 - DNA, 9 bp, Unknown
  misc_feature (1)..( 9): Result.006 file - promoters50/5663170
aagaattta

SEQ ID NO: 196445 - DNA, 9 bp, Unknown
  misc_feature (1)..( 9): Result.006 file - promoters50/5663174
attaattca

SEQ ID NO: 196446 - DNA, 7 bp, Unknown
  misc_feature (1)..( 7): Result.006 file - promoters50/5663174
aaacgat

SEQ ID NO: 196447 - DNA, 7 bp, Unknown
  misc_feature (1)..( 7): Result.006 file - promoters50/5663174
aaaagat

SEQ ID NO: 196448 - DNA, 7 bp, Unknown
  misc_feature (1)..( 7): Result.006 file - promoters50/5663182
caaagat

SEQ ID NO: 196449 - DNA, 9 bp, Unknown
  misc_feature (1)..( 9): Result.006 file - promoters50/5663182
aaaatgtaa

SEQ ID NO: 196450 - DNA, 9 bp, Unknown
  misc_feature (1)..( 9): Result.006 file - promoters50/5663182
tgaatctaa

SEQ ID NO: 196451 - DNA, 10 bp, Unknown
  misc_feature (1)..( 10): Result.006 file - promoters50/5663182
aaaattgttg

SEQ ID NO: 196452 - DNA, 8 bp, Unknown
  misc_feature (1)..( 8): Result.006 file - promoters50/5663182
aaaaaaaa

SEQ ID NO: 196453 - DNA, 8 bp, Unknown
  misc_feature (1)..( 8): Result.006 file - promoters50/5663182
aaataaat

SEQ ID NO: 196454 - DNA, 8 bp, Unknown
  misc_feature (1)..( 8): Result.006 file - promoters50/5663182
tcataaat

SEQ ID NO: 196455 - DNA, 6 bp, Unknown
  misc_feature (1)..( 6): Result.006 file - promoters50/5663182
ataaat

SEQ ID NO: 196456 - DNA, 6 bp, Unknown
  misc_feature (1)..( 6): Result.006 file - promoters50/5663182
ataaat

SEQ ID NO: 196457 - DNA, 6 bp, Unknown
  misc_feature (1)..( 6): Result.006 file - promoters50/5663182
ataaat

SEQ ID NO: 196458 - DNA, 9 bp, Unknown
  misc_feature (1)..( 9): Result.006 file - promoters50/5663182
ttttggttt

SEQ ID NO: 196459 - DNA, 9 bp, Unknown
  misc_feature (1)..( 9): Result.006 file - promoters50/5663182
tttcggttc

SEQ ID NO: 196460 - DNA, 9 bp, Unknown
  misc_feature (1)..( 9): Result.006 file - promoters50/5663186
cgtcgattc

SEQ ID NO: 196461 - DNA, 8 bp, Unknown
  misc_feature (1)..( 8): Result.006 file - promoters50/5663186
ataaatac

SEQ ID NO: 196462 - DNA, 8 bp, Unknown
  misc_feature (1)..( 8): Result.006 file - promoters50/5663186
caaaatac

SEQ ID NO: 196463 - DNA, 8 bp, Unknown
  misc_feature (1)..( 8): Result.006 file - promoters50/5663197
ataaatag

SEQ ID NO: 196464 - DNA, 9 bp, Unknown
  misc_feature (1)..( 9): Result.006 file - promoters50/5663197
ccggtgatg

SEQ ID NO: 196465 - DNA, 9 bp, Unknown
  misc_feature (1)..( 9): Result.006 file - promoters50/5663197
gaggtgatg

SEQ ID NO: 196466 - DNA, 9 bp, Unknown
  misc_feature (1)..( 9): Result.006 file - promoters50/5663197
gagctgagg

SEQ ID NO: 196467 - DNA, 7 bp, Unknown
  misc_feature (1)..( 7): Result.006 file - promoters50/5663197
gaagaag

SEQ ID NO: 196468 - DNA, 7 bp, Unknown
  misc_feature (1)..( 7): Result.006 file - promoters50/5663197
gaacaag

SEQ ID NO: 196469 - DNA, 7 bp, Unknown
  misc_feature (1)..( 7): Result.006 file - promoters50/5663197
gaagaaa

SEQ ID NO: 196470 - DNA, 10 bp, Unknown
  misc_feature (1)..( 10): Result.006 file - promoters50/5663197
ttttccctct

SEQ ID NO: 196471 - DNA, 10 bp, Unknown
  misc_feature (1)..( 10): Result.006 file - promoters50/5663197
ctttccttct

SEQ ID NO: 196472 - DNA, 10 bp, Unknown
  misc_feature (1)..( 10): Result.006 file - promoters50/5663221
ctttcctgtt

SEQ ID NO: 196473 - DNA, 12 bp, Unknown
  misc_feature (1)..( 12): Result.006 file - promoters50/5663221
tttagacccgac

SEQ ID NO: 196474 - DNA, 12 bp, Unknown
  misc_feature (1)..( 12): Result.006 file - promoters50/5663221
ataagacccgtt

SEQ ID NO: 196475 - DNA, 12 bp, Unknown
  misc_feature (1)..( 12): Result.006 file - promoters50/5663221
tttaggcccaca

SEQ ID NO: 196476 - DNA, 12 bp, Unknown
  misc_feature (1)..( 12): Result.006 file - promoters50/5663221
gacagaaccgtt

SEQ ID NO: 196477 - DNA, 12 bp, Unknown
  misc_feature (1)..( 12): Result.006 file - promoters50/5663221
taaagaccctaa

SEQ ID NO: 196478 - DNA, 12 bp, Unknown
  misc_feature (1)..( 12): Result.006 file - promoters50/5663224
aaaccaacggtt

SEQ ID NO: 196479 - DNA, 11 bp, Unknown
  misc_feature (1)..( 11): Result.006 file - promoters50/5663224
gtcatttatcg

SEQ ID NO: 196480 - DNA, 11 bp, Unknown
  misc_feature (1)..( 11): Result.006 file - promoters50/5663224
actatttatga

SEQ ID NO: 196481 - DNA, 11 bp, Unknown
  misc_feature (1)..( 11): Result.006 file - promoters50/5663224
gctttttatca

SEQ ID NO: 196482 - DNA, 11 bp, Unknown
  misc_feature (1)..( 11): Result.006 file - promoters50/5663224
actatatatat

SEQ ID NO: 196483 - DNA, 11 bp, Unknown
  misc_feature (1)..( 11): Result.006 file - promoters50/5663224
ttcatttgtat

SEQ ID NO: 196484 - DNA, 11 bp, Unknown
  misc_feature (1)..( 11): Result.006 file - promoters50/5663224
ctgatttgttt

SEQ ID NO: 196485 - DNA, 11 bp, Unknown
  misc_feature (1)..( 11): Result.006 file - promoters50/5663224
caaatttgtta

SEQ ID NO: 196486 - DNA, 14 bp, Unknown
  misc_feature (1)..( 14): Result.006 file - promoters50/5663224
ccagcaattttaat

SEQ ID NO: 196487 - DNA, 14 bp, Unknown
  misc_feature (1)..( 14): Result.006 file - promoters50/5663224
actagaattttctg

SEQ ID NO: 196488 - DNA, 14 bp, Unknown
  misc_feature (1)..( 14): Result.006 file - promoters50/5663224
ttcataatattagt

SEQ ID NO: 196489 - DNA, 14 bp, Unknown
  misc_feature (1)..( 14): Result.006 file - promoters50/5663224
atttgaatttttgt

SEQ ID NO: 196490 - DNA, 14 bp, Unknown
  misc_feature (1)..( 14): Result.006 file - promoters50/5663224
cacttcatatgagt

SEQ ID NO: 196491 - DNA, 14 bp, Unknown
  misc_feature (1)..( 14): Result.006 file - promoters50/5663224
ggttgcatttacta

SEQ ID NO: 196492 - DNA, 11 bp, Unknown
  misc_feature (1)..( 11): Result.006 file - promoters50/5663224
cgtttgttgaa

SEQ ID NO: 196493 - DNA, 11 bp, Unknown
  misc_feature (1)..( 11): Result.006 file - promoters50/5663224
actttggtgaa

SEQ ID NO: 196494 - DNA, 11 bp, Unknown
  misc_feature (1)..( 11): Result.006 file - promoters50/5663224
gatttgtttgc

SEQ ID NO: 196495 - DNA, 11 bp, Unknown
  misc_feature (1)..( 11): Result.006 file - promoters50/5663224
tgcttgttggt

SEQ ID NO: 196496 - DNA, 11 bp, Unknown
  misc_feature (1)..( 11): Result.006 file - promoters50/5663224
catttgtatac

SEQ ID NO: 196497 - DNA, 11 bp, Unknown
  misc_feature (1)..( 11): Result.006 file - promoters50/5663224
gattggttggt

SEQ ID NO: 196498 - DNA, 10 bp, Unknown
  misc_feature (1)..( 10): Result.006 file - promoters50/5663224
aattttaatt

SEQ ID NO: 196499 - DNA, 10 bp, Unknown
  misc_feature (1)..( 10): Result.006 file - promoters50/5663224
tctttttatt

SEQ ID NO: 196500 - DNA, 10 bp, Unknown
  misc_feature (1)..( 10): Result.006 file - promoters50/5663224
catttgaatt

SEQ ID NO: 196501 - DNA, 10 bp, Unknown
  misc_feature (1)..( 10): Result.006 file - promoters50/5663224
tcttcttata

SEQ ID NO: 196502 - DNA, 10 bp, Unknown
  misc_feature (1)..( 10): Result.006 file - promoters50/5663224
acttcatatg

SEQ ID NO: 196503 - DNA, 10 bp, Unknown
  misc_feature (1)..( 10): Result.006 file - promoters50/5663224
aattcataat

SEQ ID NO: 196504 - DNA, 10 bp, Unknown
  misc_feature (1)..( 10): Result.006 file - promoters50/5663224
catttttatg

SEQ ID NO: 196505 - DNA, 11 bp, Unknown
  misc_feature (1)..( 11): Result.006 file - promoters50/5663224
ctcaaattagc

SEQ ID NO: 196506 - DNA, 11 bp, Unknown
  misc_feature (1)..( 11): Result.006 file - promoters50/5663224
aacaaattagt

SEQ ID NO: 196507 - DNA, 11 bp, Unknown
  misc_feature (1)..( 11): Result.006 file - promoters50/5663224
atcaatttaga

SEQ ID NO: 196508 - DNA, 11 bp, Unknown
  misc_feature (1)..( 11): Result.006 file - promoters50/5663224
tataaatcatt

SEQ ID NO: 196509 - DNA, 11 bp, Unknown
  misc_feature (1)..( 11): Result.006 file - promoters50/5663224
ttgaatttagt

SEQ ID NO: 196510 - DNA, 11 bp, Unknown
  misc_feature (1)..( 11): Result.006 file - promoters50/5663234
tacaattgaga

SEQ ID NO: 196511 - DNA, 12 bp, Unknown
  misc_feature (1)..( 12): Result.006 file - promoters50/5663234
gccatacaagaa

SEQ ID NO: 196512 - DNA, 12 bp, Unknown
  misc_feature (1)..( 12): Result.006 file - promoters50/5663234
atcataaaagat

SEQ ID NO: 196513 - DNA, 12 bp, Unknown
  misc_feature (1)..( 12): Result.006 file - promoters50/5663234
tacaaaaaaatt

SEQ ID NO: 196514 - DNA, 12 bp, Unknown
  misc_feature (1)..( 12): Result.006 file - promoters50/5663234
agctttaaagat

SEQ ID NO: 196515 - DNA, 12 bp, Unknown
  misc_feature (1)..( 12): Result.006 file - promoters50/5663234
ttttaacaaaag

SEQ ID NO: 196516 - DNA, 11 bp, Unknown
  misc_feature (1)..( 11): Result.006 file - promoters50/5663234
tgagatgttat

SEQ ID NO: 196517 - DNA, 11 bp, Unknown
  misc_feature (1)..( 11): Result.006 file - promoters50/5663234
actattgttat

SEQ ID NO: 196518 - DNA, 11 bp, Unknown
  misc_feature (1)..( 11): Result.006 file - promoters50/5663234
attatttttac

SEQ ID NO: 196519 - DNA, 11 bp, Unknown
  misc_feature (1)..( 11): Result.006 file - promoters50/5663234
attttttttac

SEQ ID NO: 196520 - DNA, 11 bp, Unknown
  misc_feature (1)..( 11): Result.006 file - promoters50/5663234
tatatttttct

SEQ ID NO: 196521 - DNA, 9 bp, Unknown
  misc_feature (1)..( 9): Result.006 file - promoters50/5663234
taaagttat

SEQ ID NO: 196522 - DNA, 9 bp, Unknown
  misc_feature (1)..( 9): Result.006 file - promoters50/5663234
taatgttga

SEQ ID NO: 196523 - DNA, 9 bp, Unknown
  misc_feature (1)..( 9): Result.006 file - promoters50/5663234
ataagttat

SEQ ID NO: 196524 - DNA, 9 bp, Unknown
  misc_feature (1)..( 9): Result.006 file - promoters50/5663234
taaagtaaa

SEQ ID NO: 196525 - DNA, 9 bp, Unknown
  misc_feature (1)..( 9): Result.006 file - promoters50/5663234
aaaaataat

SEQ ID NO: 196526 - DNA, 10 bp, Unknown
  misc_feature (1)..( 10): Result.006 file - promoters50/5663234
gatttaatat

SEQ ID NO: 196527 - DNA, 10 bp, Unknown
  misc_feature (1)..( 10): Result.006 file - promoters50/5663234
tatttaaaat

SEQ ID NO: 196528 - DNA, 10 bp, Unknown
  misc_feature (1)..( 10): Result.006 file - promoters50/5663234
tatttatttc

SEQ ID NO: 196529 - DNA, 10 bp, Unknown
  misc_feature (1)..( 10): Result.006 file - promoters50/5663234
cttttaaaaa

SEQ ID NO: 196530 - DNA, 10 bp, Unknown
  misc_feature (1)..( 10): Result.006 file - promoters50/5663234
catttacaaa

SEQ ID NO: 196531 - DNA, 12 bp, Unknown
  misc_feature (1)..( 12): Result.006 file - promoters50/5663234
tatttatgccac

SEQ ID NO: 196532 - DNA, 12 bp, Unknown
  misc_feature (1)..( 12): Result.006 file - promoters50/5663234
tatatataaata

SEQ ID NO: 196533 - DNA, 12 bp, Unknown
  misc_feature (1)..( 12): Result.006 file - promoters50/5663234
tatatatacaca

SEQ ID NO: 196534 - DNA, 12 bp, Unknown
  misc_feature (1)..( 12): Result.006 file - promoters50/5663234
tataaataaata

SEQ ID NO: 196535 - DNA, 12 bp, Unknown
  misc_feature (1)..( 12): Result.006 file - promoters50/5663249
tatttatttgac

SEQ ID NO: 196536 - DNA, 7 bp, Unknown
  misc_feature (1)..( 7): Result.006 file - promoters50/5663249
attatct

SEQ ID NO: 196537 - DNA, 7 bp, Unknown
  misc_feature (1)..( 7): Result.006 file - promoters50/5663249
attttct

SEQ ID NO: 196538 - DNA, 7 bp, Unknown
  misc_feature (1)..( 7): Result.006 file - promoters50/5663249
tttttct

SEQ ID NO: 196539 - DNA, 8 bp, Unknown
  misc_feature (1)..( 8): Result.006 file - promoters50/5663249
taaattaa

SEQ ID NO: 196540 - DNA, 8 bp, Unknown
  misc_feature (1)..( 8): Result.006 file - promoters50/5663249
taaaataa

SEQ ID NO: 196541 - DNA, 8 bp, Unknown
  misc_feature (1)..( 8): Result.006 file - promoters50/5663249
caaattac

SEQ ID NO: 196542 - DNA, 11 bp, Unknown
  misc_feature (1)..( 11): Result.006 file - promoters50/5663249
tcaaattaatc

SEQ ID NO: 196543 - DNA, 11 bp, Unknown
  misc_feature (1)..( 11): Result.006 file - promoters50/5663249
tcaaagtaatg

SEQ ID NO: 196544 - DNA, 11 bp, Unknown
  misc_feature (1)..( 11): Result.006 file - promoters50/5663249
tctaattgatc

SEQ ID NO: 196545 - DNA, 12 bp, Unknown
  misc_feature (1)..( 12): Result.006 file - promoters50/5663249
tatgtttaattt

SEQ ID NO: 196546 - DNA, 12 bp, Unknown
  misc_feature (1)..( 12): Result.006 file - promoters50/5663249
tatttttcataa

SEQ ID NO: 196547 - DNA, 12 bp, Unknown
  misc_feature (1)..( 12): Result.006 file - promoters50/5663253
tgtttttcttaa

SEQ ID NO: 196548 - DNA, 7 bp, Unknown
  misc_feature (1)..( 7): Result.006 file - promoters50/5663253
gaaggaa

SEQ ID NO: 196549 - DNA, 7 bp, Unknown
  misc_feature (1)..( 7): Result.006 file - promoters50/5663253
gaaggaa

SEQ ID NO: 196550 - DNA, 7 bp, Unknown
  misc_feature (1)..( 7): Result.006 file - promoters50/5663264
aaaggaa

SEQ ID NO: 196551 - DNA, 7 bp, Unknown
  misc_feature (1)..( 7): Result.006 file - promoters50/5663264
aatcggc

SEQ ID NO: 196552 - DNA, 7 bp, Unknown
  misc_feature (1)..( 7): Result.006 file - promoters50/5663264
aatgggc

SEQ ID NO: 196553 - DNA, 7 bp, Unknown
  misc_feature (1)..( 7): Result.006 file - promoters50/5663301
aatgggc

SEQ ID NO: 196554 - DNA, 9 bp, Unknown
  misc_feature (1)..( 9): Result.006 file - promoters50/5663301
aaaatatat

SEQ ID NO: 196555 - DNA, 9 bp, Unknown
  misc_feature (1)..( 9): Result.006 file - promoters50/5663301
aaaacataa

SEQ ID NO: 196556 - DNA, 9 bp, Unknown
  misc_feature (1)..( 9): Result.006 file - promoters50/5663301
aaaatacac

SEQ ID NO: 196557 - DNA, 10 bp, Unknown
  misc_feature (1)..( 10): Result.006 file - promoters50/5663301
aaagatatta

SEQ ID NO: 196558 - DNA, 10 bp, Unknown
  misc_feature (1)..( 10): Result.006 file - promoters50/5663301
aacaacttaa

SEQ ID NO: 196559 - DNA, 10 bp, Unknown
  misc_feature (1)..( 10): Result.006 file - promoters50/5663301
gtaaatacgt

SEQ ID NO: 196560 - DNA, 10 bp, Unknown
  misc_feature (1)..( 10): Result.006 file - promoters50/5663301
taaacaagtt

SEQ ID NO: 196561 - DNA, 10 bp, Unknown
  misc_feature (1)..( 10): Result.006 file - promoters50/5663301
aaaacaaaaa

SEQ ID NO: 196562 - DNA, 11 bp, Unknown
  misc_feature (1)..( 11): Result.006 file - promoters50/5663301
aaagacaatga

SEQ ID NO: 196563 - DNA, 11 bp, Unknown
  misc_feature (1)..( 11): Result.006 file - promoters50/5663301
aaaaaaaaaaa

SEQ ID NO: 196564 - DNA, 11 bp, Unknown
  misc_feature (1)..( 11): Result.006 file - promoters50/5663301
aaaaaaaaaaa

SEQ ID NO: 196565 - DNA, 11 bp, Unknown
  misc_feature (1)..( 11): Result.006 file - promoters50/5663301
ttaaacaaacg

SEQ ID NO: 196566 - DNA, 13 bp, Unknown
  misc_feature (1)..( 13): Result.006 file - promoters50/5663301
tttaaaacctttc

SEQ ID NO: 196567 - DNA, 13 bp, Unknown
  misc_feature (1)..( 13): Result.006 file - promoters50/5663301
agtaaaacaaaac

SEQ ID NO: 196568 - DNA, 13 bp, Unknown
  misc_feature (1)..( 13): Result.006 file - promoters50/5663301
attaatacaattg

SEQ ID NO: 196569 - DNA, 13 bp, Unknown
  misc_feature (1)..( 13): Result.006 file - promoters50/5663301
gttagtacgaggc

SEQ ID NO: 196570 - DNA, 13 bp, Unknown
  misc_feature (1)..( 13): Result.006 file - promoters50/5663301
cccaaaaaaaaaa

SEQ ID NO: 196571 - DNA, 13 bp, Unknown
  misc_feature (1)..( 13): Result.006 file - promoters50/5663301
aagaaaaaaaaaa

SEQ ID NO: 196572 - DNA, 13 bp, Unknown
  misc_feature (1)..( 13): Result.006 file - promoters50/5663301
gattaaacaaacg

SEQ ID NO: 196573 - DNA, 13 bp, Unknown
  misc_feature (1)..( 13): Result.006 file - promoters50/5663301
tctaactagtttt

SEQ ID NO: 196574 - DNA, 13 bp, Unknown
  misc_feature (1)..( 13): Result.006 file - promoters50/5663301
tccaactagggta

SEQ ID NO: 196575 - DNA, 13 bp, Unknown
  misc_feature (1)..( 13): Result.006 file - promoters50/5663301
tcttacttgttta

SEQ ID NO: 196576 - DNA, 13 bp, Unknown
  misc_feature (1)..( 13): Result.006 file - promoters50/5663301
agagacttctttt

SEQ ID NO: 196577 - DNA, 13 bp, Unknown
  misc_feature (1)..( 13): Result.006 file - promoters50/5663301
ttttacttttttt

SEQ ID NO: 196578 - DNA, 13 bp, Unknown
  misc_feature (1)..( 13): Result.006 file - promoters50/5663305
tagtctttgctta

SEQ ID NO: 196579 - DNA, 10 bp, Unknown
  misc_feature (1)..( 10): Result.006 file - promoters50/5663305
tttttatatc

SEQ ID NO: 196580 - DNA, 10 bp, Unknown
  misc_feature (1)..( 10): Result.006 file - promoters50/5663305
gtttaatata

SEQ ID NO: 196581 - DNA, 10 bp, Unknown
  misc_feature (1)..( 10): Result.006 file - promoters50/5663305
tttttattta

SEQ ID NO: 196582 - DNA, 10 bp, Unknown
  misc_feature (1)..( 10): Result.006 file - promoters50/5663305
gtttaagtgg

SEQ ID NO: 196583 - DNA, 11 bp, Unknown
  misc_feature (1)..( 11): Result.006 file - promoters50/5663305
caagtagatat

SEQ ID NO: 196584 - DNA, 11 bp, Unknown
  misc_feature (1)..( 11): Result.006 file - promoters50/5663305
aagagagatat

SEQ ID NO: 196585 - DNA, 11 bp, Unknown
  misc_feature (1)..( 11): Result.006 file - promoters50/5663305
acctgagatag

SEQ ID NO: 196586 - DNA, 11 bp, Unknown
  misc_feature (1)..( 11): Result.006 file - promoters50/5663305
accagagatgg

SEQ ID NO: 196587 - DNA, 10 bp, Unknown
  misc_feature (1)..( 10): Result.006 file - promoters50/5663305
aaatttatat

SEQ ID NO: 196588 - DNA, 10 bp, Unknown
  misc_feature (1)..( 10): Result.006 file - promoters50/5663305
gagtttttat

SEQ ID NO: 196589 - DNA, 10 bp, Unknown
  misc_feature (1)..( 10): Result.006 file - promoters50/5663305
aaattgatac

SEQ ID NO: 196590 - DNA, 10 bp, Unknown
  misc_feature (1)..( 10): Result.006 file - promoters50/5663313
aaactgaaat

SEQ ID NO: 196591 - DNA, 7 bp, Unknown
  misc_feature (1)..( 7): Result.006 file - promoters50/5663313
tgattag

SEQ ID NO: 196592 - DNA, 7 bp, Unknown
  misc_feature (1)..( 7): Result.006 file - promoters50/5663313
ggattag

SEQ ID NO: 196593 - DNA, 7 bp, Unknown
  misc_feature (1)..( 7): Result.006 file - promoters50/5663313
tgattaa

SEQ ID NO: 196594 - DNA, 7 bp, Unknown
  misc_feature (1)..( 7): Result.006 file - promoters50/5663313
aaattgc

SEQ ID NO: 196595 - DNA, 7 bp, Unknown
  misc_feature (1)..( 7): Result.006 file - promoters50/5663313
gaattgc

SEQ ID NO: 196596 - DNA, 7 bp, Unknown
  misc_feature (1)..( 7): Result.006 file - promoters50/5663313
gaattgg

SEQ ID NO: 196597 - DNA, 7 bp, Unknown
  misc_feature (1)..( 7): Result.006 file - promoters50/5663313
tttcttc

SEQ ID NO: 196598 - DNA, 7 bp, Unknown
  misc_feature (1)..( 7): Result.006 file - promoters50/5663313
attcttc

SEQ ID NO: 196599 - DNA, 7 bp, Unknown
  misc_feature (1)..( 7): Result.006 file - promoters50/5663313
attctta

SEQ ID NO: 196600 - DNA, 8 bp, Unknown
  misc_feature (1)..( 8): Result.006 file - promoters50/5663313
ggttttgt

SEQ ID NO: 196601 - DNA, 8 bp, Unknown
  misc_feature (1)..( 8): Result.006 file - promoters50/5663313
ggtgttgg

SEQ ID NO: 196602 - DNA, 8 bp, Unknown
  misc_feature (1)..( 8): Result.006 file - promoters50/5663313
ctcgttgt

SEQ ID NO: 196603 - DNA, 10 bp, Unknown
  misc_feature (1)..( 10): Result.006 file - promoters50/5663313
ctaaattggg

SEQ ID NO: 196604 - DNA, 10 bp, Unknown
  misc_feature (1)..( 10): Result.006 file - promoters50/5663313
tgtaatcggg

SEQ ID NO: 196605 - DNA, 10 bp, Unknown
  misc_feature (1)..( 10): Result.006 file - promoters50/5663327
tgtgatcgaa

SEQ ID NO: 196606 - DNA, 11 bp, Unknown
  misc_feature (1)..( 11): Result.006 file - promoters50/5663327
aacattttttt

SEQ ID NO: 196607 - DNA, 11 bp, Unknown
  misc_feature (1)..( 11): Result.006 file - promoters50/5663327
tacattttatc

SEQ ID NO: 196608 - DNA, 11 bp, Unknown
  misc_feature (1)..( 11): Result.006 file - promoters50/5663327
aatattttttt

SEQ ID NO: 196609 - DNA, 11 bp, Unknown
  misc_feature (1)..( 11): Result.006 file - promoters50/5663327
ttaattctatg

SEQ ID NO: 196610 - DNA, 11 bp, Unknown
  misc_feature (1)..( 11): Result.006 file - promoters50/5663327
tacttttttaa

SEQ ID NO: 196611 - DNA, 11 bp, Unknown
  misc_feature (1)..( 11): Result.006 file - promoters50/5663327
tgggttttttc

SEQ ID NO: 196612 - DNA, 9 bp, Unknown
  misc_feature (1)..( 9): Result.006 file - promoters50/5663327
tgttttttg

SEQ ID NO: 196613 - DNA, 13 bp, Unknown
  misc_feature (1)..( 13): Result.006 file - promoters50/5663327
attataattacat

SEQ ID NO: 196614 - DNA, 13 bp, Unknown
  misc_feature (1)..( 13): Result.006 file - promoters50/5663327
tttaaaatcacat

SEQ ID NO: 196615 - DNA, 14 bp, Unknown
  misc_feature (1)..( 14): Result.006 file - promoters50/5663327
tttataatataaat

SEQ ID NO: 196616 - DNA, 14 bp, Unknown
  misc_feature (1)..( 14): Result.006 file - promoters50/5663327
aatcgaaatcaacc

SEQ ID NO: 196617 - DNA, 14 bp, Unknown
  misc_feature (1)..( 14): Result.006 file - promoters50/5663327
cattcaaatcaagg

SEQ ID NO: 196618 - DNA, 14 bp, Unknown
  misc_feature (1)..( 14): Result.006 file - promoters50/5663327
tttttaattctatg

SEQ ID NO: 196619 - DNA, 11 bp, Unknown
  misc_feature (1)..( 11): Result.006 file - promoters50/5663327
aaattaatttt

SEQ ID NO: 196620 - DNA, 11 bp, Unknown
  misc_feature (1)..( 11): Result.006 file - promoters50/5663327
aaactaattta

SEQ ID NO: 196621 - DNA, 12 bp, Unknown
  misc_feature (1)..( 12): Result.006 file - promoters50/5663327
ttttaaatgtta

SEQ ID NO: 196622 - DNA, 12 bp, Unknown
  misc_feature (1)..( 12): Result.006 file - promoters50/5663327
aatctaaatttt

SEQ ID NO: 196623 - DNA, 12 bp, Unknown
  misc_feature (1)..( 12): Result.006 file - promoters50/5663327
caacttatttta

SEQ ID NO: 196624 - DNA, 12 bp, Unknown
  misc_feature (1)..( 12): Result.006 file - promoters50/5663327
tatctgatgtta

SEQ ID NO: 196625 - DNA, 12 bp, Unknown
  misc_feature (1)..( 12): Result.006 file - promoters50/5663327
aacattttttta

SEQ ID NO: 196626 - DNA, 12 bp, Unknown
  misc_feature (1)..( 12): Result.006 file - promoters50/5663327
ttcgtttttttt

SEQ ID NO: 196627 - DNA, 12 bp, Unknown
  misc_feature (1)..( 12): Result.006 file - promoters50/5663327
ttacttttttaa

SEQ ID NO: 196628 - DNA, 10 bp, Unknown
  misc_feature (1)..( 10): Result.006 file - promoters50/5663327
tgttttttgc

SEQ ID NO: 196629 - DNA, 12 bp, Unknown
  misc_feature (1)..( 12): Result.006 file - promoters50/5663327
tacattttatcc

SEQ ID NO: 196630 - DNA, 12 bp, Unknown
  misc_feature (1)..( 12): Result.006 file - promoters50/5663327
aatatttttttt

SEQ ID NO: 196631 - DNA, 12 bp, Unknown
  misc_feature (1)..( 12): Result.006 file - promoters50/5663327
tgggttttttcc

SEQ ID NO: 196632 - DNA, 14 bp, Unknown
  misc_feature (1)..( 14): Result.006 file - promoters50/5663327
tacattttatcctt

SEQ ID NO: 196633 - DNA, 14 bp, Unknown
  misc_feature (1)..( 14): Result.006 file - promoters50/5663327
aatcggttatccga

SEQ ID NO: 196634 - DNA, 14 bp, Unknown
  misc_feature (1)..( 14): Result.006 file - promoters50/5663327
tcaaacttattctt

SEQ ID NO: 196635 - DNA, 14 bp, Unknown
  misc_feature (1)..( 14): Result.006 file - promoters50/5663327
tgggttttttccgt

SEQ ID NO: 196636 - DNA, 14 bp, Unknown
  misc_feature (1)..( 14): Result.006 file - promoters50/5663327
aatattttttttaa

SEQ ID NO: 196637 - DNA, 14 bp, Unknown
  misc_feature (1)..( 14): Result.006 file - promoters50/5663329
aatatttacttttt

SEQ ID NO: 196638 - DNA, 9 bp, Unknown
  misc_feature (1)..( 9): Result.006 file - promoters50/5663329
gtttgtttt

SEQ ID NO: 196639 - DNA, 9 bp, Unknown
  misc_feature (1)..( 9): Result.006 file - promoters50/5663329
gttggtttt

SEQ ID NO: 196640 - DNA, 9 bp, Unknown
  misc_feature (1)..( 9): Result.006 file - promoters50/5663333
cttggttca

SEQ ID NO: 196641 - DNA, 11 bp, Unknown
  misc_feature (1)..( 11): Result.006 file - promoters50/5663333
cgaccatggat

SEQ ID NO: 196642 - DNA, 11 bp, Unknown
  misc_feature (1)..( 11): Result.006 file - promoters50/5663333
cgatcatcagc

SEQ ID NO: 196643 - DNA, 11 bp, Unknown
  misc_feature (1)..( 11): Result.006 file - promoters50/5663333
tgatcatgaat

SEQ ID NO: 196644 - DNA, 11 bp, Unknown
  misc_feature (1)..( 11): Result.006 file - promoters50/5663333
gaatcaagaat

SEQ ID NO: 196645 - DNA, 8 bp, Unknown
  misc_feature (1)..( 8): Result.006 file - promoters50/5663333
catggata

SEQ ID NO: 196646 - DNA, 8 bp, Unknown
  misc_feature (1)..( 8): Result.006 file - promoters50/5663333
catgaata

SEQ ID NO: 196647 - DNA, 8 bp, Unknown
  misc_feature (1)..( 8): Result.006 file - promoters50/5663333
catgaaga

SEQ ID NO: 196648 - DNA, 8 bp, Unknown
  misc_feature (1)..( 8): Result.006 file - promoters50/5663336
tatgaatc

SEQ ID NO: 196649 - DNA, 15 bp, Unknown
  misc_feature (1)..( 15): Result.006 file - promoters50/5663336
aaatacttaaaccga

SEQ ID NO: 196650 - DNA, 15 bp, Unknown
  misc_feature (1)..( 15): Result.006 file - promoters50/5663336
tattaattaaacttt

SEQ ID NO: 196651 - DNA, 15 bp, Unknown
  misc_feature (1)..( 15): Result.006 file - promoters50/5663336
aaataattaaacatt

SEQ ID NO: 196652 - DNA, 15 bp, Unknown
  misc_feature (1)..( 15): Result.006 file - promoters50/5663336
taatttttaaaaaat

SEQ ID NO: 196653 - DNA, 9 bp, Unknown
  misc_feature (1)..( 9): Result.006 file - promoters50/5663336
taacagaac

SEQ ID NO: 196654 - DNA, 9 bp, Unknown
  misc_feature (1)..( 9): Result.006 file - promoters50/5663336
ctacaaaac

SEQ ID NO: 196655 - DNA, 9 bp, Unknown
  misc_feature (1)..( 9): Result.006 file - promoters50/5663336
taacagata

SEQ ID NO: 196656 - DNA, 9 bp, Unknown
  misc_feature (1)..( 9): Result.006 file - promoters50/5663336
cgctataaa

SEQ ID NO: 196657 - DNA, 12 bp, Unknown
  misc_feature (1)..( 12): Result.006 file - promoters50/5663336
ctaattttttga

SEQ ID NO: 196658 - DNA, 12 bp, Unknown
  misc_feature (1)..( 12): Result.006 file - promoters50/5663336
ctactttcacgc

SEQ ID NO: 196659 - DNA, 13 bp, Unknown
  misc_feature (1)..( 13): Result.006 file - promoters50/5663336
gtaatatttattg

SEQ ID NO: 196660 - DNA, 13 bp, Unknown
  misc_feature (1)..( 13): Result.006 file - promoters50/5663336
cgaatttttttaa

SEQ ID NO: 196661 - DNA, 13 bp, Unknown
  misc_feature (1)..( 13): Result.006 file - promoters50/5663336
cgaagtttattaa

SEQ ID NO: 196662 - DNA, 9 bp, Unknown
  misc_feature (1)..( 9): Result.006 file - promoters50/5663336
aattttttg

SEQ ID NO: 196663 - DNA, 9 bp, Unknown
  misc_feature (1)..( 9): Result.006 file - promoters50/5663336
tatttattg

SEQ ID NO: 196664 - DNA, 9 bp, Unknown
  misc_feature (1)..( 9): Result.006 file - promoters50/5663336
aattttttt

SEQ ID NO: 196665 - DNA, 9 bp, Unknown
  misc_feature (1)..( 9): Result.006 file - promoters50/5663336
agtttatta

SEQ ID NO: 196666 - DNA, 9 bp, Unknown
  misc_feature (1)..( 9): Result.006 file - promoters50/5663336
tgtaagtac

SEQ ID NO: 196667 - DNA, 9 bp, Unknown
  misc_feature (1)..( 9): Result.006 file - promoters50/5663336
tgtaagttt

SEQ ID NO: 196668 - DNA, 9 bp, Unknown
  misc_feature (1)..( 9): Result.006 file - promoters50/5663336
cataagtaa

SEQ ID NO: 196669 - DNA, 9 bp, Unknown
  misc_feature (1)..( 9): Result.006 file - promoters50/5663347
attaattaa

SEQ ID NO: 196670 - DNA, 8 bp, Unknown
  misc_feature (1)..( 8): Result.006 file - promoters50/5663347
tttgtaac

SEQ ID NO: 196671 - DNA, 8 bp, Unknown
  misc_feature (1)..( 8): Result.006 file - promoters50/5663347
gttgtaat

SEQ ID NO: 196672 - DNA, 8 bp, Unknown
  misc_feature (1)..( 8): Result.006 file - promoters50/5663347
tttgtaat

SEQ ID NO: 196673 - DNA, 8 bp, Unknown
  misc_feature (1)..( 8): Result.006 file - promoters50/5663347
gttgcaat

SEQ ID NO: 196674 - DNA, 7 bp, Unknown
  misc_feature (1)..( 7): Result.006 file - promoters50/5663347
tcaaaac

SEQ ID NO: 196675 - DNA, 7 bp, Unknown
  misc_feature (1)..( 7): Result.006 file - promoters50/5663347
tcaaaac

SEQ ID NO: 196676 - DNA, 7 bp, Unknown
  misc_feature (1)..( 7): Result.006 file - promoters50/5663347
tcataac

SEQ ID NO: 196677 - DNA, 11 bp, Unknown
  misc_feature (1)..( 11): Result.006 file - promoters50/5663347
aagaagactat

SEQ ID NO: 196678 - DNA, 11 bp, Unknown
  misc_feature (1)..( 11): Result.006 file - promoters50/5663347
acgaagactat

SEQ ID NO: 196679 - DNA, 11 bp, Unknown
  misc_feature (1)..( 11): Result.006 file - promoters50/5663358
acgaagatcct

SEQ ID NO: 196680 - DNA, 11 bp, Unknown
  misc_feature (1)..( 11): Result.006 file - promoters50/5663358
cactaaaaact

SEQ ID NO: 196681 - DNA, 11 bp, Unknown
  misc_feature (1)..( 11): Result.006 file - promoters50/5663358
ggaaaaaaact

SEQ ID NO: 196682 - DNA, 11 bp, Unknown
  misc_feature (1)..( 11): Result.006 file - promoters50/5663358
gaaaaaaaaca

SEQ ID NO: 196683 - DNA, 11 bp, Unknown
  misc_feature (1)..( 11): Result.006 file - promoters50/5663358
gaagaaaaaaa

SEQ ID NO: 196684 - DNA, 12 bp, Unknown
  misc_feature (1)..( 12): Result.006 file - promoters50/5663358
ttctaaaataat

SEQ ID NO: 196685 - DNA, 12 bp, Unknown
  misc_feature (1)..( 12): Result.006 file - promoters50/5663358
atttataatata

SEQ ID NO: 196686 - DNA, 12 bp, Unknown
  misc_feature (1)..( 12): Result.006 file - promoters50/5663358
atttatgttgtt

SEQ ID NO: 196687 - DNA, 9 bp, Unknown
  misc_feature (1)..( 9): Result.006 file - promoters50/5663358
aaaaaattc

SEQ ID NO: 196688 - DNA, 9 bp, Unknown
  misc_feature (1)..( 9): Result.006 file - promoters50/5663358
gaaaatttc

SEQ ID NO: 196689 - DNA, 9 bp, Unknown
  misc_feature (1)..( 9): Result.006 file - promoters50/5663358
gaaaaaaac

SEQ ID NO: 196690 - DNA, 9 bp, Unknown
  misc_feature (1)..( 9): Result.006 file - promoters50/5663358
taaaataat

SEQ ID NO: 196691 - DNA, 9 bp, Unknown
  misc_feature (1)..( 9): Result.006 file - promoters50/5663358
gaaaaaaaa

SEQ ID NO: 196692 - DNA, 9 bp, Unknown
  misc_feature (1)..( 9): Result.006 file - promoters50/5663370
taagatagc

SEQ ID NO: 196693 - DNA, 10 bp, Unknown
  misc_feature (1)..( 10): Result.006 file - promoters50/5663370
tggttattca

SEQ ID NO: 196694 - DNA, 10 bp, Unknown
  misc_feature (1)..( 10): Result.006 file - promoters50/5663370
tggtcattat

SEQ ID NO: 196695 - DNA, 10 bp, Unknown
  misc_feature (1)..( 10): Result.006 file - promoters50/5663370
atgttattca

SEQ ID NO: 196696 - DNA, 9 bp, Unknown
  misc_feature (1)..( 9): Result.006 file - promoters50/5663370
ttcaacatc

SEQ ID NO: 196697 - DNA, 9 bp, Unknown
  misc_feature (1)..( 9): Result.006 file - promoters50/5663370
ttctacatg

SEQ ID NO: 196698 - DNA, 9 bp, Unknown
  misc_feature (1)..( 9): Result.006 file - promoters50/5663374
gttaacatc

SEQ ID NO: 196699 - DNA, 16 bp, Unknown
  misc_feature (1)..( 16): Result.006 file - promoters50/5663374
aataaattaaatttct

SEQ ID NO: 196700 - DNA, 16 bp, Unknown
  misc_feature (1)..( 16): Result.006 file - promoters50/5663374
gggaaatgaaatatct

SEQ ID NO: 196701 - DNA, 16 bp, Unknown
  misc_feature (1)..( 16): Result.006 file - promoters50/5663374
aataaaataaatgaag

SEQ ID NO: 196702 - DNA, 9 bp, Unknown
  misc_feature (1)..( 9): Result.006 file - promoters50/5663374
agagatttg

SEQ ID NO: 196703 - DNA, 9 bp, Unknown
  misc_feature (1)..( 9): Result.006 file - promoters50/5663374
agacatttt

SEQ ID NO: 196704 - DNA, 10 bp, Unknown
  misc_feature (1)..( 10): Result.006 file - promoters50/5663374
catcatgttc

SEQ ID NO: 196705 - DNA, 9 bp, Unknown
  misc_feature (1)..( 9): Result.006 file - promoters50/5663374
ttctcacat

SEQ ID NO: 196706 - DNA, 9 bp, Unknown
  misc_feature (1)..( 9): Result.006 file - promoters50/5663374
ttcccacta

SEQ ID NO: 196707 - DNA, 9 bp, Unknown
  misc_feature (1)..( 9): Result.006 file - promoters50/5663374
aacccacta

SEQ ID NO: 196708 - DNA, 7 bp, Unknown
  misc_feature (1)..( 7): Result.006 file - promoters50/5663374
atttccc

SEQ ID NO: 196709 - DNA, 7 bp, Unknown
  misc_feature (1)..( 7): Result.006 file - promoters50/5663374
atttcca

SEQ ID NO: 196710 - DNA, 7 bp, Unknown
  misc_feature (1)..( 7): Result.006 file - promoters50/5663374
attacca

SEQ ID NO: 196711 - DNA, 10 bp, Unknown
  misc_feature (1)..( 10): Result.006 file - promoters50/5663374
catcacgtta

SEQ ID NO: 196712 - DNA, 10 bp, Unknown
  misc_feature (1)..( 10): Result.006 file - promoters50/5663374
catcatgttc

SEQ ID NO: 196713 - DNA, 10 bp, Unknown
  misc_feature (1)..( 10): Result.006 file - promoters50/5663374
agacattttc

SEQ ID NO: 196714 - DNA, 12 bp, Unknown
  misc_feature (1)..( 12): Result.006 file - promoters50/5663374
ctaattcgaaac

SEQ ID NO: 196715 - DNA, 12 bp, Unknown
  misc_feature (1)..( 12): Result.006 file - promoters50/5663374
ttaattcaaaaa

SEQ ID NO: 196716 - DNA, 12 bp, Unknown
  misc_feature (1)..( 12): Result.006 file - promoters50/5663374
ttaattaatggg

SEQ ID NO: 196717 - DNA, 12 bp, Unknown
  misc_feature (1)..( 12): Result.006 file - promoters50/5663406
taacgtcaaaaa

SEQ ID NO: 196718 - DNA, 7 bp, Unknown
  misc_feature (1)..( 7): Result.006 file - promoters50/5663406
attatga

SEQ ID NO: 196719 - DNA, 7 bp, Unknown
  misc_feature (1)..( 7): Result.006 file - promoters50/5663406
attgtga

SEQ ID NO: 196720 - DNA, 7 bp, Unknown
  misc_feature (1)..( 7): Result.006 file - promoters50/5663406
tttgtga

SEQ ID NO: 196721 - DNA, 11 bp, Unknown
  misc_feature (1)..( 11): Result.006 file - promoters50/5663406
tgtacataaat

SEQ ID NO: 196722 - DNA, 11 bp, Unknown
  misc_feature (1)..( 11): Result.006 file - promoters50/5663406
cttacctaaat

SEQ ID NO: 196723 - DNA, 11 bp, Unknown
  misc_feature (1)..( 11): Result.006 file - promoters50/5663406
cttaactattt

SEQ ID NO: 196724 - DNA, 12 bp, Unknown
  misc_feature (1)..( 12): Result.006 file - promoters50/5663406
tctttatccttt

SEQ ID NO: 196725 - DNA, 12 bp, Unknown
  misc_feature (1)..( 12): Result.006 file - promoters50/5663406
tgtcaatcattt

SEQ ID NO: 196726 - DNA, 12 bp, Unknown
  misc_feature (1)..( 12): Result.006 file - promoters50/5663418
tgtgaatcatat

SEQ ID NO: 196727 - DNA, 14 bp, Unknown
  misc_feature (1)..( 14): Result.006 file - promoters50/5663418
ggtttatttttaat

SEQ ID NO: 196728 - DNA, 14 bp, Unknown
  misc_feature (1)..( 14): Result.006 file - promoters50/5663418
ggtctattctaaat

SEQ ID NO: 196729 - DNA, 14 bp, Unknown
  misc_feature (1)..( 14): Result.006 file - promoters50/5663418
catctattctcaat

SEQ ID NO: 196730 - DNA, 14 bp, Unknown
  misc_feature (1)..( 14): Result.006 file - promoters50/5663418
tatcttttcaaatt

SEQ ID NO: 196731 - DNA, 15 bp, Unknown
  misc_feature (1)..( 15): Result.006 file - promoters50/5663418
aaaatatgatttgat

SEQ ID NO: 196732 - DNA, 15 bp, Unknown
  misc_feature (1)..( 15): Result.006 file - promoters50/5663418
cttttttgagttgat

SEQ ID NO: 196733 - DNA, 15 bp, Unknown
  misc_feature (1)..( 15): Result.006 file - promoters50/5663418
aaattattatttcca

SEQ ID NO: 196734 - DNA, 15 bp, Unknown
  misc_feature (1)..( 15): Result.006 file - promoters50/5663433
aagaagattgttgat

SEQ ID NO: 196735 - DNA, 10 bp, Unknown
  misc_feature (1)..( 10): Result.006 file - promoters50/5663433
ggcttagatt

SEQ ID NO: 196736 - DNA, 10 bp, Unknown
  misc_feature (1)..( 10): Result.006 file - promoters50/5663433
ggctttgatg

SEQ ID NO: 196737 - DNA, 10 bp, Unknown
  misc_feature (1)..( 10): Result.006 file - promoters50/5663433
tttttagatt

SEQ ID NO: 196738 - DNA, 8 bp, Unknown
  misc_feature (1)..( 8): Result.006 file - promoters50/5663433
tttttaga

SEQ ID NO: 196739 - DNA, 8 bp, Unknown
  misc_feature (1)..( 8): Result.006 file - promoters50/5663433
gtttgaga

SEQ ID NO: 196740 - DNA, 8 bp, Unknown
  misc_feature (1)..( 8): Result.006 file - promoters50/5663440
tttttatt

SEQ ID NO: 196741 - DNA, 11 bp, Unknown
  misc_feature (1)..( 11): Result.006 file - promoters50/5663440
aaaaagaaaaa

SEQ ID NO: 196742 - DNA, 11 bp, Unknown
  misc_feature (1)..( 11): Result.006 file - promoters50/5663440
taagagagaaa

SEQ ID NO: 196743 - DNA, 11 bp, Unknown
  misc_feature (1)..( 11): Result.006 file - promoters50/5663440
ctacaaataaa

SEQ ID NO: 196744 - DNA, 11 bp, Unknown
  misc_feature (1)..( 11): Result.006 file - promoters50/5663440
aagcagagaaa

SEQ ID NO: 196745 - DNA, 11 bp, Unknown
  misc_feature (1)..( 11): Result.006 file - promoters50/5663440
aaacacataat

SEQ ID NO: 196746 - DNA, 11 bp, Unknown
  misc_feature (1)..( 11): Result.006 file - promoters50/5663448
ctaaaaataat

SEQ ID NO: 196747 - DNA, 15 bp, Unknown
  misc_feature (1)..( 15): Result.006 file - promoters50/5663448
tcttgttatgatttg

SEQ ID NO: 196748 - DNA, 15 bp, Unknown
  misc_feature (1)..( 15): Result.006 file - promoters50/5663448
gaccattaggatttt

SEQ ID NO: 196749 - DNA, 15 bp, Unknown
  misc_feature (1)..( 15): Result.006 file - promoters50/5663448
tctttttataattta

SEQ ID NO: 196750 - DNA, 15 bp, Unknown
  misc_feature (1)..( 15): Result.006 file - promoters50/5663448
aaatcgaatgttttg

SEQ ID NO: 196751 - DNA, 13 bp, Unknown
  misc_feature (1)..( 13): Result.006 file - promoters50/5663448
gactcatataaca

SEQ ID NO: 196752 - DNA, 13 bp, Unknown
  misc_feature (1)..( 13): Result.006 file - promoters50/5663448
aactcaaataaca

SEQ ID NO: 196753 - DNA, 13 bp, Unknown
  misc_feature (1)..( 13): Result.006 file - promoters50/5663448
tactcatttatca

SEQ ID NO: 196754 - DNA, 13 bp, Unknown
  misc_feature (1)..( 13): Result.006 file - promoters50/5663448
aacacaaattaac

SEQ ID NO: 196755 - DNA, 13 bp, Unknown
  misc_feature (1)..( 13): Result.006 file - promoters50/5663448
aacaaaaatgata

SEQ ID NO: 196756 - DNA, 9 bp, Unknown
  misc_feature (1)..( 9): Result.006 file - promoters50/5663448
tgttttgaa

SEQ ID NO: 196757 - DNA, 9 bp, Unknown
  misc_feature (1)..( 9): Result.006 file - promoters50/5663448
tgttttttt

SEQ ID NO: 196758 - DNA, 9 bp, Unknown
  misc_feature (1)..( 9): Result.006 file - promoters50/5663448
tgtattgat

SEQ ID NO: 196759 - DNA, 9 bp, Unknown
  misc_feature (1)..( 9): Result.006 file - promoters50/5663448
aatattgat

SEQ ID NO: 196760 - DNA, 15 bp, Unknown
  misc_feature (1)..( 15): Result.006 file - promoters50/5663448
cgttaaaatagtgat

SEQ ID NO: 196761 - DNA, 15 bp, Unknown
  misc_feature (1)..( 15): Result.006 file - promoters50/5663448
tgttataattttttt

SEQ ID NO: 196762 - DNA, 15 bp, Unknown
  misc_feature (1)..( 15): Result.006 file - promoters50/5663448
tattattattttcta

SEQ ID NO: 196763 - DNA, 15 bp, Unknown
  misc_feature (1)..( 15): Result.006 file - promoters50/5663464
acttattttcaatgt

SEQ ID NO: 196764 - DNA, 11 bp, Unknown
  misc_feature (1)..( 11): Result.006 file - promoters50/5663464
tttaaataagc

SEQ ID NO: 196765 - DNA, 11 bp, Unknown
  misc_feature (1)..( 11): Result.006 file - promoters50/5663464
tttgaataatg

SEQ ID NO: 196766 - DNA, 11 bp, Unknown
  misc_feature (1)..( 11): Result.006 file - promoters50/5663464
ttcaaatcatg

SEQ ID NO: 196767 - DNA, 9 bp, Unknown
  misc_feature (1)..( 9): Result.006 file - promoters50/5663464
tttttcaag

SEQ ID NO: 196768 - DNA, 9 bp, Unknown
  misc_feature (1)..( 9): Result.006 file - promoters50/5663464
tttttcttg

SEQ ID NO: 196769 - DNA, 9 bp, Unknown
  misc_feature (1)..( 9): Result.006 file - promoters50/5663464
attttcctt

SEQ ID NO: 196770 - DNA, 8 bp, Unknown
  misc_feature (1)..( 8): Result.006 file - promoters50/5663464
cttggaaa

SEQ ID NO: 196771 - DNA, 8 bp, Unknown
  misc_feature (1)..( 8): Result.006 file - promoters50/5663464
aatggaaa

SEQ ID NO: 196772 - DNA, 8 bp, Unknown
  misc_feature (1)..( 8): Result.006 file - promoters50/5663474
aattgaat

SEQ ID NO: 196773 - DNA, 9 bp, Unknown
  misc_feature (1)..( 9): Result.006 file - promoters50/5663474
tcaaaaaga

SEQ ID NO: 196774 - DNA, 9 bp, Unknown
  misc_feature (1)..( 9): Result.006 file - promoters50/5663474
tcacaaaga

SEQ ID NO: 196775 - DNA, 9 bp, Unknown
  misc_feature (1)..( 9): Result.006 file - promoters50/5663474
acacaaatt

SEQ ID NO: 196776 - DNA, 7 bp, Unknown
  misc_feature (1)..( 7): Result.006 file - promoters50/5663474
gtttgat

SEQ ID NO: 196777 - DNA, 7 bp, Unknown
  misc_feature (1)..( 7): Result.006 file - promoters50/5663474
gttggat

SEQ ID NO: 196778 - DNA, 7 bp, Unknown
  misc_feature (1)..( 7): Result.006 file - promoters50/5663474
ttttgat

SEQ ID NO: 196779 - DNA, 7 bp, Unknown
  misc_feature (1)..( 7): Result.006 file - promoters50/5663474
catataa

SEQ ID NO: 196780 - DNA, 7 bp, Unknown
  misc_feature (1)..( 7): Result.006 file - promoters50/5663474
catgtaa

SEQ ID NO: 196781 - DNA, 7 bp, Unknown
  misc_feature (1)..( 7): Result.006 file - promoters50/5663474
aatataa

SEQ ID NO: 196782 - DNA, 9 bp, Unknown
  misc_feature (1)..( 9): Result.006 file - promoters50/5663474
tgtataatt

SEQ ID NO: 196783 - DNA, 9 bp, Unknown
  misc_feature (1)..( 9): Result.006 file - promoters50/5663474
tcaataatt

SEQ ID NO: 196784 - DNA, 9 bp, Unknown
  misc_feature (1)..( 9): Result.006 file - promoters50/5663474
tcactaata

SEQ ID NO: 196785 - DNA, 8 bp, Unknown
  misc_feature (1)..( 8): Result.006 file - promoters50/5663474
aaagtaaa

SEQ ID NO: 196786 - DNA, 8 bp, Unknown
  misc_feature (1)..( 8): Result.006 file - promoters50/5663474
aaagaaaa

SEQ ID NO: 196787 - DNA, 8 bp, Unknown
  misc_feature (1)..( 8): Result.006 file - promoters50/5663474
aaacaaag

SEQ ID NO: 196788 - DNA, 7 bp, Unknown
  misc_feature (1)..( 7): Result.006 file - promoters50/5663474
atatatg

SEQ ID NO: 196789 - DNA, 7 bp, Unknown
  misc_feature (1)..( 7): Result.006 file - promoters50/5663474
ataaatg

SEQ ID NO: 196790 - DNA, 7 bp, Unknown
  misc_feature (1)..( 7): Result.006 file - promoters50/5663478
ataaata

SEQ ID NO: 196791 - DNA, 14 bp, Unknown
  misc_feature (1)..( 14): Result.006 file - promoters50/5663478
ctcaaacttgtttc

SEQ ID NO: 196792 - DNA, 14 bp, Unknown
  misc_feature (1)..( 14): Result.006 file - promoters50/5663478
tgcaatctttaatc

SEQ ID NO: 196793 - DNA, 14 bp, Unknown
  misc_feature (1)..( 14): Result.006 file - promoters50/5663478
ctcaaaattgatta

SEQ ID NO: 196794 - DNA, 14 bp, Unknown
  misc_feature (1)..( 14): Result.006 file - promoters50/5663478
cataaaatcataat

SEQ ID NO: 196795 - DNA, 8 bp, Unknown
  misc_feature (1)..( 8): Result.006 file - promoters50/5663478
tttcttaa

SEQ ID NO: 196796 - DNA, 8 bp, Unknown
  misc_feature (1)..( 8): Result.006 file - promoters50/5663478
tttattaa

SEQ ID NO: 196797 - DNA, 8 bp, Unknown
  misc_feature (1)..( 8): Result.006 file - promoters50/5663478
tttcataa

SEQ ID NO: 196798 - DNA, 8 bp, Unknown
  misc_feature (1)..( 8): Result.006 file - promoters50/5663478
agtattaa

SEQ ID NO: 196799 - DNA, 10 bp, Unknown
  misc_feature (1)..( 10): Result.006 file - promoters50/5663478
tcattagtta

SEQ ID NO: 196800 - DNA, 10 bp, Unknown
  misc_feature (1)..( 10): Result.006 file - promoters50/5663478
tgattagtta

SEQ ID NO: 196801 - DNA, 10 bp, Unknown
  misc_feature (1)..( 10): Result.006 file - promoters50/5663478
cgatgagtac

SEQ ID NO: 196802 - DNA, 10 bp, Unknown
  misc_feature (1)..( 10): Result.006 file - promoters50/5663482
tgattagcaa

SEQ ID NO: 196803 - DNA, 9 bp, Unknown
  misc_feature (1)..( 9): Result.006 file - promoters50/5663482
ttgatagac

SEQ ID NO: 196804 - DNA, 9 bp, Unknown
  misc_feature (1)..( 9): Result.006 file - promoters50/5663482
ttggtagcc

SEQ ID NO: 196805 - DNA, 9 bp, Unknown
  misc_feature (1)..( 9): Result.006 file - promoters50/5663482
gggatagac

SEQ ID NO: 196806 - DNA, 7 bp, Unknown
  misc_feature (1)..( 7): Result.006 file - promoters50/5663482
gatagac

SEQ ID NO: 196807 - DNA, 7 bp, Unknown
  misc_feature (1)..( 7): Result.006 file - promoters50/5663482
aatagac

SEQ ID NO: 196808 - DNA, 7 bp, Unknown
  misc_feature (1)..( 7): Result.006 file - promoters50/5663482
gatagac

SEQ ID NO: 196809 - DNA, 11 bp, Unknown
  misc_feature (1)..( 11): Result.006 file - promoters50/5663482
gaacacactta

SEQ ID NO: 196810 - DNA, 11 bp, Unknown
  misc_feature (1)..( 11): Result.006 file - promoters50/5663482
gaacacttaag

SEQ ID NO: 196811 - DNA, 11 bp, Unknown
  misc_feature (1)..( 11): Result.006 file - promoters50/5663482
aaacactaaag

SEQ ID NO: 196812 - DNA, 10 bp, Unknown
  misc_feature (1)..( 10): Result.006 file - promoters50/5663482
cacacttaac

SEQ ID NO: 196813 - DNA, 10 bp, Unknown
  misc_feature (1)..( 10): Result.006 file - promoters50/5663482
aacacttaag

SEQ ID NO: 196814 - DNA, 10 bp, Unknown
  misc_feature (1)..( 10): Result.006 file - promoters50/5663490
aacactaaag

SEQ ID NO: 196815 - DNA, 11 bp, Unknown
  misc_feature (1)..( 11): Result.006 file - promoters50/5663490
ttttgaagttt

SEQ ID NO: 196816 - DNA, 11 bp, Unknown
  misc_feature (1)..( 11): Result.006 file - promoters50/5663490
agttggagttt

SEQ ID NO: 196817 - DNA, 11 bp, Unknown
  misc_feature (1)..( 11): Result.006 file - promoters50/5663490
agtcggagtaa

SEQ ID NO: 196818 - DNA, 7 bp, Unknown
  misc_feature (1)..( 7): Result.006 file - promoters50/5663490
taacgat

SEQ ID NO: 196819 - DNA, 7 bp, Unknown
  misc_feature (1)..( 7): Result.006 file - promoters50/5663490
aaacgat

SEQ ID NO: 196820 - DNA, 8 bp, Unknown
  misc_feature (1)..( 8): Result.006 file - promoters50/5663502
aaagcgaa

SEQ ID NO: 196821 - DNA, 9 bp, Unknown
  misc_feature (1)..( 9): Result.006 file - promoters50/5663502
catttcttt

SEQ ID NO: 196822 - DNA, 9 bp, Unknown
  misc_feature (1)..( 9): Result.006 file - promoters50/5663502
catttgttt

SEQ ID NO: 196823 - DNA, 9 bp, Unknown
  misc_feature (1)..( 9): Result.006 file - promoters50/5663502
tattacttt

SEQ ID NO: 196824 - DNA, 11 bp, Unknown
  misc_feature (1)..( 11): Result.006 file - promoters50/5663502
ctttttcgaat

SEQ ID NO: 196825 - DNA, 11 bp, Unknown
  misc_feature (1)..( 11): Result.006 file - promoters50/5663502
atttatcgaat

SEQ ID NO: 196826 - DNA, 11 bp, Unknown
  misc_feature (1)..( 11): Result.006 file - promoters50/5663502
attgatcaaaa

SEQ ID NO: 196827 - DNA, 11 bp, Unknown
  misc_feature (1)..( 11): Result.006 file - promoters50/5663502
atttattagag

SEQ ID NO: 196828 - DNA, 7 bp, Unknown
  misc_feature (1)..( 7): Result.006 file - promoters50/5663502
ttaaatt

SEQ ID NO: 196829 - DNA, 7 bp, Unknown
  misc_feature (1)..( 7): Result.006 file - promoters50/5663502
ttagatt

SEQ ID NO: 196830 - DNA, 7 bp, Unknown
  misc_feature (1)..( 7): Result.006 file - promoters50/5663502
gtaaatt

SEQ ID NO: 196831 - DNA, 8 bp, Unknown
  misc_feature (1)..( 8): Result.006 file - promoters50/5663502
aattctta

SEQ ID NO: 196832 - DNA, 8 bp, Unknown
  misc_feature (1)..( 8): Result.006 file - promoters50/5663502
tattcttt

SEQ ID NO: 196833 - DNA, 8 bp, Unknown
  misc_feature (1)..( 8): Result.006 file - promoters50/5663502
aattatta

SEQ ID NO: 196834 - DNA, 8 bp, Unknown
  misc_feature (1)..( 8): Result.006 file - promoters50/5663502
tttcaaac

SEQ ID NO: 196835 - DNA, 8 bp, Unknown
  misc_feature (1)..( 8): Result.006 file - promoters50/5663502
attcaaag

SEQ ID NO: 196836 - DNA, 8 bp, Unknown
  misc_feature (1)..( 8): Result.006 file - promoters50/5663502
ttttaaac

SEQ ID NO: 196837 - DNA, 14 bp, Unknown
  misc_feature (1)..( 14): Result.006 file - promoters50/5663502
tcatatttttttca

SEQ ID NO: 196838 - DNA, 14 bp, Unknown
  misc_feature (1)..( 14): Result.006 file - promoters50/5663502
tcatttttttttgt

SEQ ID NO: 196839 - DNA, 14 bp, Unknown
  misc_feature (1)..( 14): Result.006 file - promoters50/5663502
actagtttttgtgt

SEQ ID NO: 196840 - DNA, 10 bp, Unknown
  misc_feature (1)..( 10): Result.006 file - promoters50/5663502
tcacacgtct

SEQ ID NO: 196841 - DNA, 10 bp, Unknown
  misc_feature (1)..( 10): Result.006 file - promoters50/5663502
aaacacatct

SEQ ID NO: 196842 - DNA, 10 bp, Unknown
  misc_feature (1)..( 10): Result.006 file - promoters50/5663502
aaatacattt

SEQ ID NO: 196843 - DNA, 7 bp, Unknown
  misc_feature (1)..( 7): Result.006 file - promoters50/5663502
aaaaaat

SEQ ID NO: 196844 - DNA, 7 bp, Unknown
  misc_feature (1)..( 7): Result.006 file - promoters50/5663502
aaaaaaa

SEQ ID NO: 196845 - DNA, 7 bp, Unknown
  misc_feature (1)..( 7): Result.006 file - promoters50/5663502
aaaaaat

SEQ ID NO: 196846 - DNA, 7 bp, Unknown
  misc_feature (1)..( 7): Result.006 file - promoters50/5663502
acttttt

SEQ ID NO: 196847 - DNA, 7 bp, Unknown
  misc_feature (1)..( 7): Result.006 file - promoters50/5663502
actttta

SEQ ID NO: 196848 - DNA, 7 bp, Unknown
  misc_feature (1)..( 7): Result.006 file - promoters50/5663502
tctttta

SEQ ID NO: 196849 - DNA, 7 bp, Unknown
  misc_feature (1)..( 7): Result.006 file - promoters50/5663502
tttttac

SEQ ID NO: 196850 - DNA, 7 bp, Unknown
  misc_feature (1)..( 7): Result.006 file - promoters50/5663502
cttttac

SEQ ID NO: 196851 - DNA, 7 bp, Unknown
  misc_feature (1)..( 7): Result.006 file - promoters50/5663535
cttttaa

SEQ ID NO: 196852 - DNA, 6 bp, Unknown
  misc_feature (1)..( 6): Result.006 file - promoters50/5663535
ttacat

SEQ ID NO: 196853 - DNA, 6 bp, Unknown
  misc_feature (1)..( 6): Result.006 file - promoters50/5663535
ttacat

SEQ ID NO: 196854 - DNA, 6 bp, Unknown
  misc_feature (1)..( 6): Result.006 file - promoters50/5663535
ttacat

SEQ ID NO: 196855 - DNA, 8 bp, Unknown
  misc_feature (1)..( 8): Result.006 file - promoters50/5663535
ccactttc

SEQ ID NO: 196856 - DNA, 8 bp, Unknown
  misc_feature (1)..( 8): Result.006 file - promoters50/5663535
ccaatttt

SEQ ID NO: 196857 - DNA, 8 bp, Unknown
  misc_feature (1)..( 8): Result.006 file - promoters50/5663539
cgactaat

SEQ ID NO: 196858 - DNA, 10 bp, Unknown
  misc_feature (1)..( 10): Result.006 file - promoters50/5663539
ttaataccat

SEQ ID NO: 196859 - DNA, 10 bp, Unknown
  misc_feature (1)..( 10): Result.006 file - promoters50/5663539
ttaatagcat

SEQ ID NO: 196860 - DNA, 10 bp, Unknown
  misc_feature (1)..( 10): Result.006 file - promoters50/5663539
ttaataccat

SEQ ID NO: 196861 - DNA, 7 bp, Unknown
  misc_feature (1)..( 7): Result.006 file - promoters50/5663539
tattttt

SEQ ID NO: 196862 - DNA, 7 bp, Unknown
  misc_feature (1)..( 7): Result.006 file - promoters50/5663539
tattttt

SEQ ID NO: 196863 - DNA, 7 bp, Unknown
  misc_feature (1)..( 7): Result.006 file - promoters50/5663539
tattttc

SEQ ID NO: 196864 - DNA, 7 bp, Unknown
  misc_feature (1)..( 7): Result.006 file - promoters50/5663539
tattttt

SEQ ID NO: 196865 - DNA, 8 bp, Unknown
  misc_feature (1)..( 8): Result.006 file - promoters50/5663539
gaatttta

SEQ ID NO: 196866 - DNA, 8 bp, Unknown
  misc_feature (1)..( 8): Result.006 file - promoters50/5663539
taatttta

SEQ ID NO: 196867 - DNA, 8 bp, Unknown
  misc_feature (1)..( 8): Result.006 file - promoters50/5663539
atattttt

SEQ ID NO: 196868 - DNA, 7 bp, Unknown
  misc_feature (1)..( 7): Result.006 file - promoters50/5663539
tttgagt

SEQ ID NO: 196869 - DNA, 7 bp, Unknown
  misc_feature (1)..( 7): Result.006 file - promoters50/5663539
tttaagt

SEQ ID NO: 196870 - DNA, 7 bp, Unknown
  misc_feature (1)..( 7): Result.006 file - promoters50/5663539
tttgagt

SEQ ID NO: 196871 - DNA, 7 bp, Unknown
  misc_feature (1)..( 7): Result.006 file - promoters50/5663539
tgtgttg

SEQ ID NO: 196872 - DNA, 7 bp, Unknown
  misc_feature (1)..( 7): Result.006 file - promoters50/5663539
tgttttg

SEQ ID NO: 196873 - DNA, 7 bp, Unknown
  misc_feature (1)..( 7): Result.006 file - promoters50/5663539
tgtgttg

SEQ ID NO: 196874 - DNA, 8 bp, Unknown
  misc_feature (1)..( 8): Result.006 file - promoters50/5663539
tctttttt

SEQ ID NO: 196875 - DNA, 8 bp, Unknown
  misc_feature (1)..( 8): Result.006 file - promoters50/5663539
tatttttt

SEQ ID NO: 196876 - DNA, 8 bp, Unknown
  misc_feature (1)..( 8): Result.006 file - promoters50/5663539
tattttta

SEQ ID NO: 196877 - DNA, 8 bp, Unknown
  misc_feature (1)..( 8): Result.006 file - promoters50/5663539
taatttgg

SEQ ID NO: 196878 - DNA, 8 bp, Unknown
  misc_feature (1)..( 8): Result.006 file - promoters50/5663539
taatttaa

SEQ ID NO: 196879 - DNA, 8 bp, Unknown
  misc_feature (1)..( 8): Result.006 file - promoters50/5663539
aaatttaa

SEQ ID NO: 196880 - DNA, 7 bp, Unknown
  misc_feature (1)..( 7): Result.006 file - promoters50/5663539
aaataat

SEQ ID NO: 196881 - DNA, 7 bp, Unknown
  misc_feature (1)..( 7): Result.006 file - promoters50/5663539
aaaaaat

SEQ ID NO: 196882 - DNA, 7 bp, Unknown
  misc_feature (1)..( 7): Result.006 file - promoters50/5663539
aaataat

SEQ ID NO: 196883 - DNA, 6 bp, Unknown
  misc_feature (1)..( 6): Result.006 file - promoters50/5663539
tattgt

SEQ ID NO: 196884 - DNA, 6 bp, Unknown
  misc_feature (1)..( 6): Result.006 file - promoters50/5663539
tattgt

SEQ ID NO: 196885 - DNA, 6 bp, Unknown
  misc_feature (1)..( 6): Result.006 file - promoters50/5663539
tattgt

SEQ ID NO: 196886 - DNA, 9 bp, Unknown
  misc_feature (1)..( 9): Result.006 file - promoters50/5663539
tccatccat

SEQ ID NO: 196887 - DNA, 9 bp, Unknown
  misc_feature (1)..( 9): Result.006 file - promoters50/5663539
tccattcat

SEQ ID NO: 196888 - DNA, 9 bp, Unknown
  misc_feature (1)..( 9): Result.006 file - promoters50/5663589
tccatccat

SEQ ID NO: 196889 - DNA, 9 bp, Unknown
  misc_feature (1)..( 9): Result.006 file - promoters50/5663589
taggttacc

SEQ ID NO: 196890 - DNA, 9 bp, Unknown
  misc_feature (1)..( 9): Result.006 file - promoters50/5663589
taggttaag

SEQ ID NO: 196891 - DNA, 9 bp, Unknown
  misc_feature (1)..( 9): Result.006 file - promoters50/5663589
ttggtcaag

SEQ ID NO: 196892 - DNA, 8 bp, Unknown
  misc_feature (1)..( 8): Result.006 file - promoters50/5663589
ggatttat

SEQ ID NO: 196893 - DNA, 8 bp, Unknown
  misc_feature (1)..( 8): Result.006 file - promoters50/5663589
ggattttt

SEQ ID NO: 196894 - DNA, 8 bp, Unknown
  misc_feature (1)..( 8): Result.006 file - promoters50/5663595
tgatttat

SEQ ID NO: 196895 - DNA, 8 bp, Unknown
  misc_feature (1)..( 8): Result.006 file - promoters50/5663595
gtttattt

SEQ ID NO: 196896 - DNA, 8 bp, Unknown
  misc_feature (1)..( 8): Result.006 file - promoters50/5663595
ttttgttt

SEQ ID NO: 196897 - DNA, 8 bp, Unknown
  misc_feature (1)..( 8): Result.006 file - promoters50/5663607
ttttattt

SEQ ID NO: 196898 - DNA, 8 bp, Unknown
  misc_feature (1)..( 8): Result.006 file - promoters50/5663607
gatagata

SEQ ID NO: 196899 - DNA, 8 bp, Unknown
  misc_feature (1)..( 8): Result.006 file - promoters50/5663607
aataaata

SEQ ID NO: 196900 - DNA, 8 bp, Unknown
  misc_feature (1)..( 8): Result.006 file - promoters50/5663614
aataaaat

SEQ ID NO: 196901 - DNA, 8 bp, Unknown
  misc_feature (1)..( 8): Result.006 file - promoters50/5663614
aaacttta

SEQ ID NO: 196902 - DNA, 8 bp, Unknown
  misc_feature (1)..( 8): Result.006 file - promoters50/5663614
caacatta

SEQ ID NO: 196903 - DNA, 8 bp, Unknown
  misc_feature (1)..( 8): Result.006 file - promoters50/5663614
caactttt

SEQ ID NO: 196904 - DNA, 8 bp, Unknown
  misc_feature (1)..( 8): Result.006 file - promoters50/5663614
aaaattta

SEQ ID NO: 196905 - DNA, 8 bp, Unknown
  misc_feature (1)..( 8): Result.006 file - promoters50/5663614
taacatta

SEQ ID NO: 196906 - DNA, 8 bp, Unknown
  misc_feature (1)..( 8): Result.006 file - promoters50/5663614
aaaaataa

SEQ ID NO: 196907 - DNA, 10 bp, Unknown
  misc_feature (1)..( 10): Result.006 file - promoters50/5663614
aaatatatca

SEQ ID NO: 196908 - DNA, 10 bp, Unknown
  misc_feature (1)..( 10): Result.006 file - promoters50/5663614
atatatattc

SEQ ID NO: 196909 - DNA, 10 bp, Unknown
  misc_feature (1)..( 10): Result.006 file - promoters50/5663614
tgctatatca

SEQ ID NO: 196910 - DNA, 10 bp, Unknown
  misc_feature (1)..( 10): Result.006 file - promoters50/5663614
ggataaatta

SEQ ID NO: 196911 - DNA, 10 bp, Unknown
  misc_feature (1)..( 10): Result.006 file - promoters50/5663614
ggaaaaaaaa

SEQ ID NO: 196912 - DNA, 10 bp, Unknown
  misc_feature (1)..( 10): Result.006 file - promoters50/5663614
aacaaaatta

SEQ ID NO: 196913 - DNA, 14 bp, Unknown
  misc_feature (1)..( 14): Result.006 file - promoters50/5663614
gaaaaacctttttt

SEQ ID NO: 196914 - DNA, 14 bp, Unknown
  misc_feature (1)..( 14): Result.006 file - promoters50/5663614
taaacaccatttta

SEQ ID NO: 196915 - DNA, 15 bp, Unknown
  misc_feature (1)..( 15): Result.006 file - promoters50/5663614
tttctctatttgttt

SEQ ID NO: 196916 - DNA, 15 bp, Unknown
  misc_feature (1)..( 15): Result.006 file - promoters50/5663614
taaaaacaatttaaa

SEQ ID NO: 196917 - DNA, 15 bp, Unknown
  misc_feature (1)..( 15): Result.006 file - promoters50/5663614
aactcaccattgatt

SEQ ID NO: 196918 - DNA, 15 bp, Unknown
  misc_feature (1)..( 15): Result.006 file - promoters50/5663614
taagaactcatttga

SEQ ID NO: 196919 - DNA, 15 bp, Unknown
  misc_feature (1)..( 15): Result.006 file - promoters50/5663614
atatcaccacttggt

SEQ ID NO: 196920 - DNA, 11 bp, Unknown
  misc_feature (1)..( 11): Result.006 file - promoters50/5663614
gaaaaatatat

SEQ ID NO: 196921 - DNA, 11 bp, Unknown
  misc_feature (1)..( 11): Result.006 file - promoters50/5663614
ctaaaataact

SEQ ID NO: 196922 - DNA, 11 bp, Unknown
  misc_feature (1)..( 11): Result.006 file - promoters50/5663614
aaaaaattgag

SEQ ID NO: 196923 - DNA, 11 bp, Unknown
  misc_feature (1)..( 11): Result.006 file - promoters50/5663614
aaaaaatctgt

SEQ ID NO: 196924 - DNA, 11 bp, Unknown
  misc_feature (1)..( 11): Result.006 file - promoters50/5663614
acaaaattaac

SEQ ID NO: 196925 - DNA, 11 bp, Unknown
  misc_feature (1)..( 11): Result.006 file - promoters50/5663614
gataaattaca

SEQ ID NO: 196926 - DNA, 8 bp, Unknown
  misc_feature (1)..( 8): Result.006 file - promoters50/5663614
attttaaa

SEQ ID NO: 196927 - DNA, 8 bp, Unknown
  misc_feature (1)..( 8): Result.006 file - promoters50/5663614
gtttgaaa

SEQ ID NO: 196928 - DNA, 8 bp, Unknown
  misc_feature (1)..( 8): Result.006 file - promoters50/5663614
aatttaaa

SEQ ID NO: 196929 - DNA, 8 bp, Unknown
  misc_feature (1)..( 8): Result.006 file - promoters50/5663614
atttgaag

SEQ ID NO: 196930 - DNA, 8 bp, Unknown
  misc_feature (1)..( 8): Result.006 file - promoters50/5663614
attcgaat

SEQ ID NO: 196931 - DNA, 8 bp, Unknown
  misc_feature (1)..( 8): Result.006 file - promoters50/5663625
attcaaaa

SEQ ID NO: 196932 - DNA, 8 bp, Unknown
  misc_feature (1)..( 8): Result.006 file - promoters50/5663625
atatgatt

SEQ ID NO: 196933 - DNA, 8 bp, Unknown
  misc_feature (1)..( 8): Result.006 file - promoters50/5663625
atatgagt

SEQ ID NO: 196934 - DNA, 8 bp, Unknown
  misc_feature (1)..( 8): Result.006 file - promoters50/5663625
gtatgatg

SEQ ID NO: 196935 - DNA, 8 bp, Unknown
  misc_feature (1)..( 8): Result.006 file - promoters50/5663625
atattagt

SEQ ID NO: 196936 - DNA, 8 bp, Unknown
  misc_feature (1)..( 8): Result.006 file - promoters50/5663625
atattagt

SEQ ID NO: 196937 - DNA, 8 bp, Unknown
  misc_feature (1)..( 8): Result.006 file - promoters50/5663625
atattagt

SEQ ID NO: 196938 - DNA, 12 bp, Unknown
  misc_feature (1)..( 12): Result.006 file - promoters50/5663625
ataaaaacacaa

SEQ ID NO: 196939 - DNA, 12 bp, Unknown
  misc_feature (1)..( 12): Result.006 file - promoters50/5663625
atacaaacttta

SEQ ID NO: 196940 - DNA, 12 bp, Unknown
  misc_feature (1)..( 12): Result.006 file - promoters50/5663625
ataataactctt

SEQ ID NO: 196941 - DNA, 12 bp, Unknown
  misc_feature (1)..( 12): Result.006 file - promoters50/5663625
aaaataactgtg

SEQ ID NO: 196942 - DNA, 12 bp, Unknown
  misc_feature (1)..( 12): Result.006 file - promoters50/5663625
ttcataacttta

SEQ ID NO: 196943 - DNA, 12 bp, Unknown
  misc_feature (1)..( 12): Result.006 file - promoters50/5663625
taattaagttta

SEQ ID NO: 196944 - DNA, 12 bp, Unknown
  misc_feature (1)..( 12): Result.006 file - promoters50/5663625
ttgtcatagtta

SEQ ID NO: 196945 - DNA, 12 bp, Unknown
  misc_feature (1)..( 12): Result.006 file - promoters50/5663625
ttgtaataatta

SEQ ID NO: 196946 - DNA, 12 bp, Unknown
  misc_feature (1)..( 12): Result.006 file - promoters50/5663625
ttaaaataattc

SEQ ID NO: 196947 - DNA, 12 bp, Unknown
  misc_feature (1)..( 12): Result.006 file - promoters50/5663625
aacaaaaaatta

SEQ ID NO: 196948 - DNA, 12 bp, Unknown
  misc_feature (1)..( 12): Result.006 file - promoters50/5663625
aaccaataatgg

SEQ ID NO: 196949 - DNA, 12 bp, Unknown
  misc_feature (1)..( 12): Result.006 file - promoters50/5663625
agtggatattgg

SEQ ID NO: 196950 - DNA, 18 bp, Unknown
  misc_feature (1)..( 18): Result.006 file - promoters50/5663625
gagttcataatctcgtac

SEQ ID NO: 196951 - DNA, 18 bp, Unknown
  misc_feature (1)..( 18): Result.006 file - promoters50/5663625
ttgtttatataaaatata

SEQ ID NO: 196952 - DNA, 18 bp, Unknown
  misc_feature (1)..( 18): Result.006 file - promoters50/5663625
atgtttaatctgagtata

SEQ ID NO: 196953 - DNA, 18 bp, Unknown
  misc_feature (1)..( 18): Result.006 file - promoters50/5663625
ttgcttacaatttcactc

SEQ ID NO: 196954 - DNA, 18 bp, Unknown
  misc_feature (1)..( 18): Result.006 file - promoters50/5663625
agttttactttttttttt

SEQ ID NO: 196955 - DNA, 18 bp, Unknown
  misc_feature (1)..( 18): Result.006 file - promoters50/5663625
ttatttaacttttttttt

SEQ ID NO: 196956 - DNA, 12 bp, Unknown
  misc_feature (1)..( 12): Result.006 file - promoters50/5663625
aatatacttttt

SEQ ID NO: 196957 - DNA, 12 bp, Unknown
  misc_feature (1)..( 12): Result.006 file - promoters50/5663625
gttttacttttt

SEQ ID NO: 196958 - DNA, 12 bp, Unknown
  misc_feature (1)..( 12): Result.006 file - promoters50/5663625
atttaacttttt

SEQ ID NO: 196959 - DNA, 12 bp, Unknown
  misc_feature (1)..( 12): Result.006 file - promoters50/5663625
gtttttcttttc

SEQ ID NO: 196960 - DNA, 12 bp, Unknown
  misc_feature (1)..( 12): Result.006 file - promoters50/5663625
tctttgcttaca

SEQ ID NO: 196961 - DNA, 12 bp, Unknown
  misc_feature (1)..( 12): Result.006 file - promoters50/5663644
aaagttgtttat

SEQ ID NO: 196962 - DNA, 9 bp, Unknown
  misc_feature (1)..( 9): Result.006 file - promoters50/5663644
aaactaaaa

SEQ ID NO: 196963 - DNA, 9 bp, Unknown
  misc_feature (1)..( 9): Result.006 file - promoters50/5663644
aaattaaaa

SEQ ID NO: 196964 - DNA, 9 bp, Unknown
  misc_feature (1)..( 9): Result.006 file - promoters50/5663644
caactaaaa

SEQ ID NO: 196965 - DNA, 7 bp, Unknown
  misc_feature (1)..( 7): Result.006 file - promoters50/5663644
aaatttt

SEQ ID NO: 196966 - DNA, 7 bp, Unknown
  misc_feature (1)..( 7): Result.006 file - promoters50/5663644
aaattta

SEQ ID NO: 196967 - DNA, 8 bp, Unknown
  misc_feature (1)..( 8): Result.006 file - promoters50/5663644
aaatattt

SEQ ID NO: 196968 - DNA, 8 bp, Unknown
  misc_feature (1)..( 8): Result.006 file - promoters50/5663644
attgtttt

SEQ ID NO: 196969 - DNA, 8 bp, Unknown
  misc_feature (1)..( 8): Result.006 file - promoters50/5663644
attttttt

SEQ ID NO: 196970 - DNA, 8 bp, Unknown
  misc_feature (1)..( 8): Result.006 file - promoters50/5663644
ctttatta

SEQ ID NO: 196971 - DNA, 12 bp, Unknown
  misc_feature (1)..( 12): Result.006 file - promoters50/5663644
tacaaaacattt

SEQ ID NO: 196972 - DNA, 12 bp, Unknown
  misc_feature (1)..( 12): Result.006 file - promoters50/5663644
gaaaaaatattt

SEQ ID NO: 196973 - DNA, 12 bp, Unknown
  misc_feature (1)..( 12): Result.006 file - promoters50/5663644
gaaaaaataaat

SEQ ID NO: 196974 - DNA, 7 bp, Unknown
  misc_feature (1)..( 7): Result.006 file - promoters50/5663644
aattttt

SEQ ID NO: 196975 - DNA, 7 bp, Unknown
  misc_feature (1)..( 7): Result.006 file - promoters50/5663644
tattttt

SEQ ID NO: 196976 - DNA, 7 bp, Unknown
  misc_feature (1)..( 7): Result.006 file - promoters50/5663688
tatttta

SEQ ID NO: 196977 - DNA, 9 bp, Unknown
  misc_feature (1)..( 9): Result.006 file - promoters50/5663688
cgtgtgtct

SEQ ID NO: 196978 - DNA, 9 bp, Unknown
  misc_feature (1)..( 9): Result.006 file - promoters50/5663688
attgtttct

SEQ ID NO: 196979 - DNA, 9 bp, Unknown
  misc_feature (1)..( 9): Result.006 file - promoters50/5663688
attatttgg

SEQ ID NO: 196980 - DNA, 9 bp, Unknown
  misc_feature (1)..( 9): Result.006 file - promoters50/5663688
aatatttgt

SEQ ID NO: 196981 - DNA, 9 bp, Unknown
  misc_feature (1)..( 9): Result.006 file - promoters50/5663688
gttgcattt

SEQ ID NO: 196982 - DNA, 9 bp, Unknown
  misc_feature (1)..( 9): Result.006 file - promoters50/5663688
tttggattt

SEQ ID NO: 196983 - DNA, 9 bp, Unknown
  misc_feature (1)..( 9): Result.006 file - promoters50/5663688
tgtggattc

SEQ ID NO: 196984 - DNA, 9 bp, Unknown
  misc_feature (1)..( 9): Result.006 file - promoters50/5663688
tttgttgat

SEQ ID NO: 196985 - DNA, 9 bp, Unknown
  misc_feature (1)..( 9): Result.006 file - promoters50/5663688
tattacttg

SEQ ID NO: 196986 - DNA, 9 bp, Unknown
  misc_feature (1)..( 9): Result.006 file - promoters50/5663688
tattatttg

SEQ ID NO: 196987 - DNA, 9 bp, Unknown
  misc_feature (1)..( 9): Result.006 file - promoters50/5663688
cattactta

SEQ ID NO: 196988 - DNA, 9 bp, Unknown
  misc_feature (1)..( 9): Result.006 file - promoters50/5663688
gattgtttc

SEQ ID NO: 196989 - DNA, 9 bp, Unknown
  misc_feature (1)..( 9): Result.006 file - promoters50/5663688
ttaggaaac

SEQ ID NO: 196990 - DNA, 9 bp, Unknown
  misc_feature (1)..( 9): Result.006 file - promoters50/5663688
ttaagaact

SEQ ID NO: 196991 - DNA, 9 bp, Unknown
  misc_feature (1)..( 9): Result.006 file - promoters50/5663688
cgaggaaac

SEQ ID NO: 196992 - DNA, 9 bp, Unknown
  misc_feature (1)..( 9): Result.006 file - promoters50/5663688
ataaaaaca

SEQ ID NO: 196993 - DNA, 11 bp, Unknown
  misc_feature (1)..( 11): Result.006 file - promoters50/5663688
tatgtgtgttg

SEQ ID NO: 196994 - DNA, 11 bp, Unknown
  misc_feature (1)..( 11): Result.006 file - promoters50/5663688
tatttgttgat

SEQ ID NO: 196995 - DNA, 11 bp, Unknown
  misc_feature (1)..( 11): Result.006 file - promoters50/5663688
tatttggattt

SEQ ID NO: 196996 - DNA, 11 bp, Unknown
  misc_feature (1)..( 11): Result.006 file - promoters50/5663700
gttttgtggat

SEQ ID NO: 196997 - DNA, 8 bp, Unknown
  misc_feature (1)..( 8): Result.006 file - promoters50/5663700
taaaatat

SEQ ID NO: 196998 - DNA, 8 bp, Unknown
  misc_feature (1)..( 8): Result.006 file - promoters50/5663700
taaaattt

SEQ ID NO: 196999 - DNA, 8 bp, Unknown
  misc_feature (1)..( 8): Result.006 file - promoters50/5663700
taaaatat

SEQ ID NO: 197000 - DNA, 7 bp, Unknown
  misc_feature (1)..( 7): Result.006 file - promoters50/5663700
tttatgt

SEQ ID NO: 197001 - DNA, 7 bp, Unknown
  misc_feature (1)..( 7): Result.006 file - promoters50/5663700
tttgtgt

SEQ ID NO: 197002 - DNA, 7 bp, Unknown
  misc_feature (1)..( 7): Result.006 file - promoters50/5663706
tgtatta

SEQ ID NO: 197003 - DNA, 15 bp, Unknown
  misc_feature (1)..( 15): Result.006 file - promoters50/5663706
tgagattctatagta

SEQ ID NO: 197004 - DNA, 15 bp, Unknown
  misc_feature (1)..( 15): Result.006 file - promoters50/5663706
ataaattgtatagtt

SEQ ID NO: 197005 - DNA, 15 bp, Unknown
  misc_feature (1)..( 15): Result.006 file - promoters50/5663706
tgacattctatcttt

SEQ ID NO: 197006 - DNA, 15 bp, Unknown
  misc_feature (1)..( 15): Result.006 file - promoters50/5663706
gtagattcaatcttt

SEQ ID NO: 197007 - DNA, 10 bp, Unknown
  misc_feature (1)..( 10): Result.006 file - promoters50/5663706
taattaattt

SEQ ID NO: 197008 - DNA, 10 bp, Unknown
  misc_feature (1)..( 10): Result.006 file - promoters50/5663706
ttatttattc

SEQ ID NO: 197009 - DNA, 10 bp, Unknown
  misc_feature (1)..( 10): Result.006 file - promoters50/5663706
taattagttt

SEQ ID NO: 197010 - DNA, 10 bp, Unknown
  misc_feature (1)..( 10): Result.006 file - promoters50/5663706
taattaacaa

SEQ ID NO: 197011 - DNA, 7 bp, Unknown
  misc_feature (1)..( 7): Result.006 file - promoters50/5663706
gtagaaa

SEQ ID NO: 197012 - DNA, 7 bp, Unknown
  misc_feature (1)..( 7): Result.006 file - promoters50/5663706
gtataaa

SEQ ID NO: 197013 - DNA, 7 bp, Unknown
  misc_feature (1)..( 7): Result.006 file - promoters50/5663706
gtaaaaa

SEQ ID NO: 197014 - DNA, 7 bp, Unknown
  misc_feature (1)..( 7): Result.006 file - promoters50/5663706
ctaaaaa

SEQ ID NO: 197015 - DNA, 8 bp, Unknown
  misc_feature (1)..( 8): Result.006 file - promoters50/5663706
aaatattc

SEQ ID NO: 197016 - DNA, 8 bp, Unknown
  misc_feature (1)..( 8): Result.006 file - promoters50/5663706
aaatatcc

SEQ ID NO: 197017 - DNA, 8 bp, Unknown
  misc_feature (1)..( 8): Result.006 file - promoters50/5663706
gaatattt

SEQ ID NO: 197018 - DNA, 9 bp, Unknown
  misc_feature (1)..( 9): Result.006 file - promoters50/5663706
caataattc

SEQ ID NO: 197019 - DNA, 10 bp, Unknown
  misc_feature (1)..( 10): Result.006 file - promoters50/5663706
aaaattttaa

SEQ ID NO: 197020 - DNA, 10 bp, Unknown
  misc_feature (1)..( 10): Result.006 file - promoters50/5663706
aaaattctaa

SEQ ID NO: 197021 - DNA, 10 bp, Unknown
  misc_feature (1)..( 10): Result.006 file - promoters50/5663706
aaaatgttat

SEQ ID NO: 197022 - DNA, 11 bp, Unknown
  misc_feature (1)..( 11): Result.006 file - promoters50/5663706
aaacattgtat

SEQ ID NO: 197023 - DNA, 10 bp, Unknown
  misc_feature (1)..( 10): Result.006 file - promoters50/5663706
tctttatcct

SEQ ID NO: 197024 - DNA, 10 bp, Unknown
  misc_feature (1)..( 10): Result.006 file - promoters50/5663706
tctatataaa

SEQ ID NO: 197025 - DNA, 10 bp, Unknown
  misc_feature (1)..( 10): Result.006 file - promoters50/5663706
cctatatata

SEQ ID NO: 197026 - DNA, 10 bp, Unknown
  misc_feature (1)..( 10): Result.006 file - promoters50/5663710
cctatataaa

SEQ ID NO: 197027 - DNA, 8 bp, Unknown
  misc_feature (1)..( 8): Result.006 file - promoters50/5663710
tatgaatc

SEQ ID NO: 197028 - DNA, 8 bp, Unknown
  misc_feature (1)..( 8): Result.006 file - promoters50/5663710
catgaata

SEQ ID NO: 197029 - DNA, 8 bp, Unknown
  misc_feature (1)..( 8): Result.006 file - promoters50/5663710
catggata

SEQ ID NO: 197030 - DNA, 11 bp, Unknown
  misc_feature (1)..( 11): Result.006 file - promoters50/5663710
tctataaaaag

SEQ ID NO: 197031 - DNA, 11 bp, Unknown
  misc_feature (1)..( 11): Result.006 file - promoters50/5663710
tctatcaaagt

SEQ ID NO: 197032 - DNA, 11 bp, Unknown
  misc_feature (1)..( 11): Result.006 file - promoters50/5663710
gacatcacagt

SEQ ID NO: 197033 - DNA, 7 bp, Unknown
  misc_feature (1)..( 7): Result.006 file - promoters50/5663710
catatat

SEQ ID NO: 197034 - DNA, 7 bp, Unknown
  misc_feature (1)..( 7): Result.006 file - promoters50/5663710
tatatat

SEQ ID NO: 197035 - DNA, 7 bp, Unknown
  misc_feature (1)..( 7): Result.006 file - promoters50/5663728
tatataa

SEQ ID NO: 197036 - DNA, 7 bp, Unknown
  misc_feature (1)..( 7): Result.006 file - promoters50/5663728
ccatata

SEQ ID NO: 197037 - DNA, 7 bp, Unknown
  misc_feature (1)..( 7): Result.006 file - promoters50/5663728
gcatata

SEQ ID NO: 197038 - DNA, 7 bp, Unknown
  misc_feature (1)..( 7): Result.006 file - promoters50/5663728
gcatata

SEQ ID NO: 197039 - DNA, 9 bp, Unknown
  misc_feature (1)..( 9): Result.006 file - promoters50/5663728
tactaaaaa

SEQ ID NO: 197040 - DNA, 9 bp, Unknown
  misc_feature (1)..( 9): Result.006 file - promoters50/5663728
ttttaaaaa

SEQ ID NO: 197041 - DNA, 9 bp, Unknown
  misc_feature (1)..( 9): Result.006 file - promoters50/5663732
ttttaaatg

SEQ ID NO: 197042 - DNA, 10 bp, Unknown
  misc_feature (1)..( 10): Result.006 file - promoters50/5663732
ctaatattgg

SEQ ID NO: 197043 - DNA, 10 bp, Unknown
  misc_feature (1)..( 10): Result.006 file - promoters50/5663732
ctaagattca

SEQ ID NO: 197044 - DNA, 10 bp, Unknown
  misc_feature (1)..( 10): Result.006 file - promoters50/5663732
acaaaataat

SEQ ID NO: 197045 - DNA, 12 bp, Unknown
  misc_feature (1)..( 12): Result.006 file - promoters50/5663732
atgtgtataaaa

SEQ ID NO: 197046 - DNA, 12 bp, Unknown
  misc_feature (1)..( 12): Result.006 file - promoters50/5663732
ttttgtctaaaa

SEQ ID NO: 197047 - DNA, 12 bp, Unknown
  misc_feature (1)..( 12): Result.006 file - promoters50/5663740
ttttttcttttt

SEQ ID NO: 197048 - DNA, 7 bp, Unknown
  misc_feature (1)..( 7): Result.006 file - promoters50/5663740
catactt

SEQ ID NO: 197049 - DNA, 7 bp, Unknown
  misc_feature (1)..( 7): Result.006 file - promoters50/5663740
tatactt

SEQ ID NO: 197050 - DNA, 7 bp, Unknown
  misc_feature (1)..( 7): Result.006 file - promoters50/5663740
tatgctt

SEQ ID NO: 197051 - DNA, 9 bp, Unknown
  misc_feature (1)..( 9): Result.006 file - promoters50/5663740
gtaatatct

SEQ ID NO: 197052 - DNA, 9 bp, Unknown
  misc_feature (1)..( 9): Result.006 file - promoters50/5663740
gtattatct

SEQ ID NO: 197053 - DNA, 9 bp, Unknown
  misc_feature (1)..( 9): Result.006 file - promoters50/5663740
aaattttct

SEQ ID NO: 197054 - DNA, 10 bp, Unknown
  misc_feature (1)..( 10): Result.006 file - promoters50/5663740
ccattttgca

SEQ ID NO: 197055 - DNA, 10 bp, Unknown
  misc_feature (1)..( 10): Result.006 file - promoters50/5663740
taattttgca

SEQ ID NO: 197056 - DNA, 10 bp, Unknown
  misc_feature (1)..( 10): Result.006 file - promoters50/5663740
ccattttttc

SEQ ID NO: 197057 - DNA, 8 bp, Unknown
  misc_feature (1)..( 8): Result.006 file - promoters50/5663740
aagatact

SEQ ID NO: 197058 - DNA, 8 bp, Unknown
  misc_feature (1)..( 8): Result.006 file - promoters50/5663740
tagatact

SEQ ID NO: 197059 - DNA, 8 bp, Unknown
  misc_feature (1)..( 8): Result.006 file - promoters50/5663740
tagatatt

SEQ ID NO: 197060 - DNA, 13 bp, Unknown
  misc_feature (1)..( 13): Result.006 file - promoters50/5663740
ttaaacttcgaat

SEQ ID NO: 197061 - DNA, 13 bp, Unknown
  misc_feature (1)..( 13): Result.006 file - promoters50/5663740
ttaaatttctaat

SEQ ID NO: 197062 - DNA, 13 bp, Unknown
  misc_feature (1)..( 13): Result.006 file - promoters50/5663746
cttttttttgaat

SEQ ID NO: 197063 - DNA, 8 bp, Unknown
  misc_feature (1)..( 8): Result.006 file - promoters50/5663746
tatctatt

SEQ ID NO: 197064 - DNA, 8 bp, Unknown
  misc_feature (1)..( 8): Result.006 file - promoters50/5663746
tatttatc

SEQ ID NO: 197065 - DNA, 8 bp, Unknown
  misc_feature (1)..( 8): Result.006 file - promoters50/5663748
tttctatt

SEQ ID NO: 197066 - DNA, 11 bp, Unknown
  misc_feature (1)..( 11): Result.006 file - promoters50/5663748
aagaaaattaa

SEQ ID NO: 197067 - DNA, 11 bp, Unknown
  misc_feature (1)..( 11): Result.006 file - promoters50/5663748
aaaaaaattca

SEQ ID NO: 197068 - DNA, 11 bp, Unknown
  misc_feature (1)..( 11): Result.006 file - promoters50/5663748
tcaaaaataaa

SEQ ID NO: 197069 - DNA, 11 bp, Unknown
  misc_feature (1)..( 11): Result.006 file - promoters50/5663748
taaaaaacaaa

SEQ ID NO: 197070 - DNA, 11 bp, Unknown
  misc_feature (1)..( 11): Result.006 file - promoters50/5663748
acaaaagaata

SEQ ID NO: 197071 - DNA, 11 bp, Unknown
  misc_feature (1)..( 11): Result.006 file - promoters50/5663748
aaaaaaaaaaa

SEQ ID NO: 197072 - DNA, 15 bp, Unknown
  misc_feature (1)..( 15): Result.006 file - promoters50/5663748
aaaaaaatcaagaaa

SEQ ID NO: 197073 - DNA, 15 bp, Unknown
  misc_feature (1)..( 15): Result.006 file - promoters50/5663748
ataaatatcctcact

SEQ ID NO: 197074 - DNA, 15 bp, Unknown
  misc_feature (1)..( 15): Result.006 file - promoters50/5663748
ccaaaaaaaaaaaaa

SEQ ID NO: 197075 - DNA, 15 bp, Unknown
  misc_feature (1)..( 15): Result.006 file - promoters50/5663748
agaaacatcattcat

SEQ ID NO: 197076 - DNA, 15 bp, Unknown
  misc_feature (1)..( 15): Result.006 file - promoters50/5663748
aaaaaaataaaaaaa

SEQ ID NO: 197077 - DNA, 15 bp, Unknown
  misc_feature (1)..( 15): Result.006 file - promoters50/5663748
tcaaaaataaatcga

SEQ ID NO: 197078 - DNA, 15 bp, Unknown
  misc_feature (1)..( 15): Result.006 file - promoters50/5663748
ctaaaaaacaaaagt

SEQ ID NO: 197079 - DNA, 15 bp, Unknown
  misc_feature (1)..( 15): Result.006 file - promoters50/5663752
acaaaagaataaata

SEQ ID NO: 197080 - DNA, 8 bp, Unknown
  misc_feature (1)..( 8): Result.006 file - promoters50/5663752
aaataaac

SEQ ID NO: 197081 - DNA, 8 bp, Unknown
  misc_feature (1)..( 8): Result.006 file - promoters50/5663752
gaattaac

SEQ ID NO: 197082 - DNA, 8 bp, Unknown
  misc_feature (1)..( 8): Result.006 file - promoters50/5663752
aaactaag

SEQ ID NO: 197083 - DNA, 9 bp, Unknown
  misc_feature (1)..( 9): Result.006 file - promoters50/5663752
taatttaaa

SEQ ID NO: 197084 - DNA, 9 bp, Unknown
  misc_feature (1)..( 9): Result.006 file - promoters50/5663752
taattaaaa

SEQ ID NO: 197085 - DNA, 9 bp, Unknown
  misc_feature (1)..( 9): Result.006 file - promoters50/5663752
ttatataag

SEQ ID NO: 197086 - DNA, 11 bp, Unknown
  misc_feature (1)..( 11): Result.006 file - promoters50/5663752
agaaaaaaaaa

SEQ ID NO: 197087 - DNA, 11 bp, Unknown
  misc_feature (1)..( 11): Result.006 file - promoters50/5663752
tataaagaaaa

SEQ ID NO: 197088 - DNA, 11 bp, Unknown
  misc_feature (1)..( 11): Result.006 file - promoters50/5663752
aagaaagaaag

SEQ ID NO: 197089 - DNA, 11 bp, Unknown
  misc_feature (1)..( 11): Result.006 file - promoters50/5663752
aaatcaagaag

SEQ ID NO: 197090 - DNA, 11 bp, Unknown
  misc_feature (1)..( 11): Result.006 file - promoters50/5663752
aaaacaaaaca

SEQ ID NO: 197091 - DNA, 11 bp, Unknown
  misc_feature (1)..( 11): Result.006 file - promoters50/5663752
aaatcaaattg

SEQ ID NO: 197092 - DNA, 12 bp, Unknown
  misc_feature (1)..( 12): Result.006 file - promoters50/5663752
aaacacaataca

SEQ ID NO: 197093 - DNA, 7 bp, Unknown
  misc_feature (1)..( 7): Result.006 file - promoters50/5663752
caaaaaa

SEQ ID NO: 197094 - DNA, 7 bp, Unknown
  misc_feature (1)..( 7): Result.006 file - promoters50/5663752
caaaaaa

SEQ ID NO: 197095 - DNA, 7 bp, Unknown
  misc_feature (1)..( 7): Result.006 file - promoters50/5663752
taaaaat

SEQ ID NO: 197096 - DNA, 7 bp, Unknown
  misc_feature (1)..( 7): Result.006 file - promoters50/5663752
tctttta

SEQ ID NO: 197097 - DNA, 7 bp, Unknown
  misc_feature (1)..( 7): Result.006 file - promoters50/5663752
tcttttc

SEQ ID NO: 197098 - DNA, 7 bp, Unknown
  misc_feature (1)..( 7): Result.006 file - promoters50/5663752
tctgtta

SEQ ID NO: 197099 - DNA, 11 bp, Unknown
  misc_feature (1)..( 11): Result.006 file - promoters50/5663752
ataataaaaga

SEQ ID NO: 197100 - DNA, 11 bp, Unknown
  misc_feature (1)..( 11): Result.006 file - promoters50/5663752
ttaataacagt

SEQ ID NO: 197101 - DNA, 11 bp, Unknown
  misc_feature (1)..( 11): Result.006 file - promoters50/5663752
ttaattactaa

SEQ ID NO: 197102 - DNA, 12 bp, Unknown
  misc_feature (1)..( 12): Result.006 file - promoters50/5663752
aaaaacaatgag

SEQ ID NO: 197103 - DNA, 12 bp, Unknown
  misc_feature (1)..( 12): Result.006 file - promoters50/5663752
aaaatcaatgca

SEQ ID NO: 197104 - DNA, 12 bp, Unknown
  misc_feature (1)..( 12): Result.006 file - promoters50/5663752
tatctcagtgca

SEQ ID NO: 197105 - DNA, 8 bp, Unknown
  misc_feature (1)..( 8): Result.006 file - promoters50/5663752
aaaattat

SEQ ID NO: 197106 - DNA, 8 bp, Unknown
  misc_feature (1)..( 8): Result.006 file - promoters50/5663752
aaatttat

SEQ ID NO: 197107 - DNA, 8 bp, Unknown
  misc_feature (1)..( 8): Result.006 file - promoters50/5663752
atatttat

SEQ ID NO: 197108 - DNA, 8 bp, Unknown
  misc_feature (1)..( 8): Result.006 file - promoters50/5663752
ttgaatgc

SEQ ID NO: 197109 - DNA, 8 bp, Unknown
  misc_feature (1)..( 8): Result.006 file - promoters50/5663752
tagaatgc

SEQ ID NO: 197110 - DNA, 8 bp, Unknown
  misc_feature (1)..( 8): Result.006 file - promoters50/5663752
taggatgc

SEQ ID NO: 197111 - DNA, 12 bp, Unknown
  misc_feature (1)..( 12): Result.006 file - promoters50/5663752
aaagacaaatca

SEQ ID NO: 197112 - DNA, 12 bp, Unknown
  misc_feature (1)..( 12): Result.006 file - promoters50/5663752
aaacacaataca

SEQ ID NO: 197113 - DNA, 12 bp, Unknown
  misc_feature (1)..( 12): Result.006 file - promoters50/5663752
aaaaacaaaaca

SEQ ID NO: 197114 - DNA, 9 bp, Unknown
  misc_feature (1)..( 9): Result.006 file - promoters50/5663752
gaatcttta

SEQ ID NO: 197115 - DNA, 9 bp, Unknown
  misc_feature (1)..( 9): Result.006 file - promoters50/5663752
gaatcttca

SEQ ID NO: 197116 - DNA, 9 bp, Unknown
  misc_feature (1)..( 9): Result.006 file - promoters50/5663758
agatcttca

SEQ ID NO: 197117 - DNA, 8 bp, Unknown
  misc_feature (1)..( 8): Result.006 file - promoters50/5663758
gtaaaatt

SEQ ID NO: 197118 - DNA, 8 bp, Unknown
  misc_feature (1)..( 8): Result.006 file - promoters50/5663758
ctaaaatc

SEQ ID NO: 197119 - DNA, 8 bp, Unknown
  misc_feature (1)..( 8): Result.006 file - promoters50/5663758
ctaaaata

SEQ ID NO: 197120 - DNA, 8 bp, Unknown
  misc_feature (1)..( 8): Result.006 file - promoters50/5663758
aaaaaatt

SEQ ID NO: 197121 - DNA, 8 bp, Unknown
  misc_feature (1)..( 8): Result.006 file - promoters50/5663758
gtaaaaga

SEQ ID NO: 197122 - DNA, 8 bp, Unknown
  misc_feature (1)..( 8): Result.006 file - promoters50/5663772
ctacaatt

SEQ ID NO: 197123 - DNA, 7 bp, Unknown
  misc_feature (1)..( 7): Result.006 file - promoters50/5663772
attgaat

SEQ ID NO: 197124 - DNA, 7 bp, Unknown
  misc_feature (1)..( 7): Result.006 file - promoters50/5663772
cttgaat

SEQ ID NO: 197125 - DNA, 7 bp, Unknown
  misc_feature (1)..( 7): Result.006 file - promoters50/5663772
attcaat

SEQ ID NO: 197126 - DNA, 10 bp, Unknown
  misc_feature (1)..( 10): Result.006 file - promoters50/5663772
aggctctaag

SEQ ID NO: 197127 - DNA, 10 bp, Unknown
  misc_feature (1)..( 10): Result.006 file - promoters50/5663772
tggctttaag

SEQ ID NO: 197128 - DNA, 10 bp, Unknown
  misc_feature (1)..( 10): Result.006 file - promoters50/5663772
tggttttcta

SEQ ID NO: 197129 - DNA, 7 bp, Unknown
  misc_feature (1)..( 7): Result.006 file - promoters50/5663772
aaatcaa

SEQ ID NO: 197130 - DNA, 7 bp, Unknown
  misc_feature (1)..( 7): Result.006 file - promoters50/5663772
aaatcac

SEQ ID NO: 197131 - DNA, 7 bp, Unknown
  misc_feature (1)..( 7): Result.006 file - promoters50/5663774
gaatcac

SEQ ID NO: 197132 - DNA, 6 bp, Unknown
  misc_feature (1)..( 6): Result.006 file - promoters50/5663774
ttttct

SEQ ID NO: 197133 - DNA, 6 bp, Unknown
  misc_feature (1)..( 6): Result.006 file - promoters50/5663774
ttttct

SEQ ID NO: 197134 - DNA, 6 bp, Unknown
  misc_feature (1)..( 6): Result.006 file - promoters50/5663774
ttttct

SEQ ID NO: 197135 - DNA, 8 bp, Unknown
  misc_feature (1)..( 8): Result.006 file - promoters50/5663774
aatattta

SEQ ID NO: 197136 - DNA, 8 bp, Unknown
  misc_feature (1)..( 8): Result.006 file - promoters50/5663774
aattttta

SEQ ID NO: 197137 - DNA, 8 bp, Unknown
  misc_feature (1)..( 8): Result.006 file - promoters50/5663774
tatttttt

SEQ ID NO: 197138 - DNA, 11 bp, Unknown
  misc_feature (1)..( 11): Result.006 file - promoters50/5663774
aacataaataa

SEQ ID NO: 197139 - DNA, 11 bp, Unknown
  misc_feature (1)..( 11): Result.006 file - promoters50/5663774
acaatatataa

SEQ ID NO: 197140 - DNA, 11 bp, Unknown
  misc_feature (1)..( 11): Result.006 file - promoters50/5663774
aacaaaaatca

SEQ ID NO: 197141 - DNA, 14 bp, Unknown
  misc_feature (1)..( 14): Result.006 file - promoters50/5663774
cgaatcaaacgaaa

SEQ ID NO: 197142 - DNA, 14 bp, Unknown
  misc_feature (1)..( 14): Result.006 file - promoters50/5663774
gaaataaaaccaaa

SEQ ID NO: 197143 - DNA, 15 bp, Unknown
  misc_feature (1)..( 15): Result.006 file - promoters50/5663778
agaagtaaaggggcg

SEQ ID NO: 197144 - DNA, 12 bp, Unknown
  misc_feature (1)..( 12): Result.006 file - promoters50/5663778
gaaaagtatggg

SEQ ID NO: 197145 - DNA, 12 bp, Unknown
  misc_feature (1)..( 12): Result.006 file - promoters50/5663778
gaaatgtatcga

SEQ ID NO: 197146 - DNA, 12 bp, Unknown
  misc_feature (1)..( 12): Result.006 file - promoters50/5663778
ataatttattta

SEQ ID NO: 197147 - DNA, 12 bp, Unknown
  misc_feature (1)..( 12): Result.006 file - promoters50/5663778
tttatgaatctg

SEQ ID NO: 197148 - DNA, 12 bp, Unknown
  misc_feature (1)..( 12): Result.006 file - promoters50/5663778
ctattgaacctg

SEQ ID NO: 197149 - DNA, 11 bp, Unknown
  misc_feature (1)..( 11): Result.006 file - promoters50/5663778
tactaatgttt

SEQ ID NO: 197150 - DNA, 11 bp, Unknown
  misc_feature (1)..( 11): Result.006 file - promoters50/5663778
tacaaatgttt

SEQ ID NO: 197151 - DNA, 11 bp, Unknown
  misc_feature (1)..( 11): Result.006 file - promoters50/5663778
tactaacactt

SEQ ID NO: 197152 - DNA, 11 bp, Unknown
  misc_feature (1)..( 11): Result.006 file - promoters50/5663778
atttaatattt

SEQ ID NO: 197153 - DNA, 11 bp, Unknown
  misc_feature (1)..( 11): Result.006 file - promoters50/5663778
tgctaatgtga

SEQ ID NO: 197154 - DNA, 11 bp, Unknown
  misc_feature (1)..( 11): Result.006 file - promoters50/5663778
ctctattctta

SEQ ID NO: 197155 - DNA, 10 bp, Unknown
  misc_feature (1)..( 10): Result.006 file - promoters50/5663778
cttttgatta

SEQ ID NO: 197156 - DNA, 10 bp, Unknown
  misc_feature (1)..( 10): Result.006 file - promoters50/5663778
tgtttgatta

SEQ ID NO: 197157 - DNA, 10 bp, Unknown
  misc_feature (1)..( 10): Result.006 file - promoters50/5663778
aagttggtta

SEQ ID NO: 197158 - DNA, 10 bp, Unknown
  misc_feature (1)..( 10): Result.006 file - promoters50/5663778
tgtgtgatcg

SEQ ID NO: 197159 - DNA, 10 bp, Unknown
  misc_feature (1)..( 10): Result.006 file - promoters50/5663778
gtcttggttg

SEQ ID NO: 197160 - DNA, 10 bp, Unknown
  misc_feature (1)..( 10): Result.006 file - promoters50/5663778
atttaacccg

SEQ ID NO: 197161 - DNA, 10 bp, Unknown
  misc_feature (1)..( 10): Result.006 file - promoters50/5663778
gtttaacaga

SEQ ID NO: 197162 - DNA, 10 bp, Unknown
  misc_feature (1)..( 10): Result.006 file - promoters50/5663778
atttaatatt

SEQ ID NO: 197163 - DNA, 10 bp, Unknown
  misc_feature (1)..( 10): Result.006 file - promoters50/5663778
attgaacctg

SEQ ID NO: 197164 - DNA, 10 bp, Unknown
  misc_feature (1)..( 10): Result.006 file - promoters50/5663785
tatgaatctg

SEQ ID NO: 197165 - DNA, 10 bp, Unknown
  misc_feature (1)..( 10): Result.006 file - promoters50/5663785
aaaaagaaaa

SEQ ID NO: 197166 - DNA, 10 bp, Unknown
  misc_feature (1)..( 10): Result.006 file - promoters50/5663785
caaaataaaa

SEQ ID NO: 197167 - DNA, 10 bp, Unknown
  misc_feature (1)..( 10): Result.006 file - promoters50/5663785
aaaaataaac

SEQ ID NO: 197168 - DNA, 10 bp, Unknown
  misc_feature (1)..( 10): Result.006 file - promoters50/5663785
caaaagacaa

SEQ ID NO: 197169 - DNA, 10 bp, Unknown
  misc_feature (1)..( 10): Result.006 file - promoters50/5663785
taaaataaat

SEQ ID NO: 197170 - DNA, 10 bp, Unknown
  misc_feature (1)..( 10): Result.006 file - promoters50/5663785
aaaaataata

SEQ ID NO: 197171 - DNA, 10 bp, Unknown
  misc_feature (1)..( 10): Result.006 file - promoters50/5663785
taaagtaatt

SEQ ID NO: 197172 - DNA, 12 bp, Unknown
  misc_feature (1)..( 12): Result.006 file - promoters50/5663785
cattaaaaaaaa

SEQ ID NO: 197173 - DNA, 12 bp, Unknown
  misc_feature (1)..( 12): Result.006 file - promoters50/5663785
atgaaaaataaa

SEQ ID NO: 197174 - DNA, 12 bp, Unknown
  misc_feature (1)..( 12): Result.006 file - promoters50/5663785
aagacaaataaa

SEQ ID NO: 197175 - DNA, 12 bp, Unknown
  misc_feature (1)..( 12): Result.006 file - promoters50/5663785
atttaaaataaa

SEQ ID NO: 197176 - DNA, 12 bp, Unknown
  misc_feature (1)..( 12): Result.006 file - promoters50/5663785
aaccaaaataaa

SEQ ID NO: 197177 - DNA, 12 bp, Unknown
  misc_feature (1)..( 12): Result.006 file - promoters50/5663785
ttataaagtaat

SEQ ID NO: 197178 - DNA, 13 bp, Unknown
  misc_feature (1)..( 13): Result.006 file - promoters50/5663785
aaacagaaatcgc

SEQ ID NO: 197179 - DNA, 13 bp, Unknown
  misc_feature (1)..( 13): Result.006 file - promoters50/5663785
aaacaaaaatgac

SEQ ID NO: 197180 - DNA, 13 bp, Unknown
  misc_feature (1)..( 13): Result.006 file - promoters50/5663785
tccaagaaatggt

SEQ ID NO: 197181 - DNA, 13 bp, Unknown
  misc_feature (1)..( 13): Result.006 file - promoters50/5663785
aatttgaattggt

SEQ ID NO: 197182 - DNA, 13 bp, Unknown
  misc_feature (1)..( 13): Result.006 file - promoters50/5663785
aaaaaaaaaaaat

SEQ ID NO: 197183 - DNA, 13 bp, Unknown
  misc_feature (1)..( 13): Result.006 file - promoters50/5663785
aaaccaaaacgac

SEQ ID NO: 197184 - DNA, 13 bp, Unknown
  misc_feature (1)..( 13): Result.006 file - promoters50/5663785
atttaaccaaaat

SEQ ID NO: 197185 - DNA, 13 bp, Unknown
  misc_feature (1)..( 13): Result.006 file - promoters50/5663785
aataaactaaaca

SEQ ID NO: 197186 - DNA, 13 bp, Unknown
  misc_feature (1)..( 13): Result.006 file - promoters50/5663785
ttataaccaaaaa

SEQ ID NO: 197187 - DNA, 13 bp, Unknown
  misc_feature (1)..( 13): Result.006 file - promoters50/5663785
gtttcaccaaggt

SEQ ID NO: 197188 - DNA, 13 bp, Unknown
  misc_feature (1)..( 13): Result.006 file - promoters50/5663785
tttaaaataaatc

SEQ ID NO: 197189 - DNA, 13 bp, Unknown
  misc_feature (1)..( 13): Result.006 file - promoters50/5663785
agacaaataaatc

SEQ ID NO: 197190 - DNA, 13 bp, Unknown
  misc_feature (1)..( 13): Result.006 file - promoters50/5663805
tttaaaatatgca

SEQ ID NO: 197191 - DNA, 14 bp, Unknown
  misc_feature (1)..( 14): Result.006 file - promoters50/5663805
acttataatgaatt

SEQ ID NO: 197192 - DNA, 14 bp, Unknown
  misc_feature (1)..( 14): Result.006 file - promoters50/5663805
actcataataaata

SEQ ID NO: 197193 - DNA, 14 bp, Unknown
  misc_feature (1)..( 14): Result.006 file - promoters50/5663805
atttataatataat

SEQ ID NO: 197194 - DNA, 14 bp, Unknown
  misc_feature (1)..( 14): Result.006 file - promoters50/5663805
tcatataatagtaa

SEQ ID NO: 197195 - DNA, 14 bp, Unknown
  misc_feature (1)..( 14): Result.006 file - promoters50/5663805
taaaataaggaatt

SEQ ID NO: 197196 - DNA, 14 bp, Unknown
  misc_feature (1)..( 14): Result.006 file - promoters50/5663805
tcttttaattttct

SEQ ID NO: 197197 - DNA, 14 bp, Unknown
  misc_feature (1)..( 14): Result.006 file - promoters50/5663805
tctcataagtttga

SEQ ID NO: 197198 - DNA, 10 bp, Unknown
  misc_feature (1)..( 10): Result.006 file - promoters50/5663805
ttaataacaa

SEQ ID NO: 197199 - DNA, 10 bp, Unknown
  misc_feature (1)..( 10): Result.006 file - promoters50/5663805
ataataaata

SEQ ID NO: 197200 - DNA, 10 bp, Unknown
  misc_feature (1)..( 10): Result.006 file - promoters50/5663805
ttattatact

SEQ ID NO: 197201 - DNA, 10 bp, Unknown
  misc_feature (1)..( 10): Result.006 file - promoters50/5663805
ataaaaaata

SEQ ID NO: 197202 - DNA, 10 bp, Unknown
  misc_feature (1)..( 10): Result.006 file - promoters50/5663805
caaataacca

SEQ ID NO: 197203 - DNA, 10 bp, Unknown
  misc_feature (1)..( 10): Result.006 file - promoters50/5663805
aaaagaaaaa

SEQ ID NO: 197204 - DNA, 10 bp, Unknown
  misc_feature (1)..( 10): Result.006 file - promoters50/5663805
ggaaaaaatg

SEQ ID NO: 197205 - DNA, 9 bp, Unknown
  misc_feature (1)..( 9): Result.006 file - promoters50/5663805
ctttttatc

SEQ ID NO: 197206 - DNA, 9 bp, Unknown
  misc_feature (1)..( 9): Result.006 file - promoters50/5663805
ttttttaat

SEQ ID NO: 197207 - DNA, 9 bp, Unknown
  misc_feature (1)..( 9): Result.006 file - promoters50/5663805
atttgtata

SEQ ID NO: 197208 - DNA, 9 bp, Unknown
  misc_feature (1)..( 9): Result.006 file - promoters50/5663805
atttttaag

SEQ ID NO: 197209 - DNA, 9 bp, Unknown
  misc_feature (1)..( 9): Result.006 file - promoters50/5663805
tggtgtata

SEQ ID NO: 197210 - DNA, 10 bp, Unknown
  misc_feature (1)..( 10): Result.006 file - promoters50/5663805
ttttttcatt

SEQ ID NO: 197211 - DNA, 10 bp, Unknown
  misc_feature (1)..( 10): Result.006 file - promoters50/5663805
taaattcatt

SEQ ID NO: 197212 - DNA, 9 bp, Unknown
  misc_feature (1)..( 9): Result.006 file - promoters50/5663805
cttaatgac

SEQ ID NO: 197213 - DNA, 9 bp, Unknown
  misc_feature (1)..( 9): Result.006 file - promoters50/5663805
tttattgat

SEQ ID NO: 197214 - DNA, 10 bp, Unknown
  misc_feature (1)..( 10): Result.006 file - promoters50/5663805
aaataatgaa

SEQ ID NO: 197215 - DNA, 9 bp, Unknown
  misc_feature (1)..( 9): Result.006 file - promoters50/5663805
tttgttggt

SEQ ID NO: 197216 - DNA, 9 bp, Unknown
  misc_feature (1)..( 9): Result.006 file - promoters50/5663805
gttactgat

SEQ ID NO: 197217 - DNA, 10 bp, Unknown
  misc_feature (1)..( 10): Result.006 file - promoters50/5663805
tttcattatc

SEQ ID NO: 197218 - DNA, 10 bp, Unknown
  misc_feature (1)..( 10): Result.006 file - promoters50/5663805
attcatttct

SEQ ID NO: 197219 - DNA, 10 bp, Unknown
  misc_feature (1)..( 10): Result.006 file - promoters50/5663805
ataaaaattg

SEQ ID NO: 197220 - DNA, 10 bp, Unknown
  misc_feature (1)..( 10): Result.006 file - promoters50/5663805
atataaaatc

SEQ ID NO: 197221 - DNA, 10 bp, Unknown
  misc_feature (1)..( 10): Result.006 file - promoters50/5663805
agaaaaaaaa

SEQ ID NO: 197222 - DNA, 10 bp, Unknown
  misc_feature (1)..( 10): Result.006 file - promoters50/5663805
ataaaaaata

SEQ ID NO: 197223 - DNA, 10 bp, Unknown
  misc_feature (1)..( 10): Result.006 file - promoters50/5663805
gaaaaaatgc

SEQ ID NO: 197224 - DNA, 11 bp, Unknown
  misc_feature (1)..( 11): Result.006 file - promoters50/5663805
ataataaatag

SEQ ID NO: 197225 - DNA, 10 bp, Unknown
  misc_feature (1)..( 10): Result.006 file - promoters50/5663805
ataacaaatc

SEQ ID NO: 197226 - DNA, 10 bp, Unknown
  misc_feature (1)..( 10): Result.006 file - promoters50/5663805
ataaaaaata

SEQ ID NO: 197227 - DNA, 10 bp, Unknown
  misc_feature (1)..( 10): Result.006 file - promoters50/5663805
ataacaattt

SEQ ID NO: 197228 - DNA, 10 bp, Unknown
  misc_feature (1)..( 10): Result.006 file - promoters50/5663805
ataataaata

SEQ ID NO: 197229 - DNA, 10 bp, Unknown
  misc_feature (1)..( 10): Result.006 file - promoters50/5663805
aaccaaaata

SEQ ID NO: 197230 - DNA, 10 bp, Unknown
  misc_feature (1)..( 10): Result.006 file - promoters50/5663805
aaaagaaaaa

SEQ ID NO: 197231 - DNA, 12 bp, Unknown
  misc_feature (1)..( 12): Result.006 file - promoters50/5663805
tcaatcaaaaga

SEQ ID NO: 197232 - DNA, 12 bp, Unknown
  misc_feature (1)..( 12): Result.006 file - promoters50/5663805
ttgatccaaaca

SEQ ID NO: 197233 - DNA, 12 bp, Unknown
  misc_feature (1)..( 12): Result.006 file - promoters50/5663805
tcaattaaaagg

SEQ ID NO: 197234 - DNA, 12 bp, Unknown
  misc_feature (1)..( 12): Result.006 file - promoters50/5663805
attatcctaact

SEQ ID NO: 197235 - DNA, 12 bp, Unknown
  misc_feature (1)..( 12): Result.006 file - promoters50/5663805
ccagaccataca

SEQ ID NO: 197236 - DNA, 12 bp, Unknown
  misc_feature (1)..( 12): Result.006 file - promoters50/5663805
ggaataaaaagt

SEQ ID NO: 197237 - DNA, 11 bp, Unknown
  misc_feature (1)..( 11): Result.006 file - promoters50/5663805
tgaatattaga

SEQ ID NO: 197238 - DNA, 11 bp, Unknown
  misc_feature (1)..( 11): Result.006 file - promoters50/5663805
tgaatattaga

SEQ ID NO: 197239 - DNA, 11 bp, Unknown
  misc_feature (1)..( 11): Result.006 file - promoters50/5663805
caaattttatt

SEQ ID NO: 197240 - DNA, 11 bp, Unknown
  misc_feature (1)..( 11): Result.006 file - promoters50/5663805
aaaattaatga

SEQ ID NO: 197241 - DNA, 11 bp, Unknown
  misc_feature (1)..( 11): Result.006 file - promoters50/5663805
gggtttttata

SEQ ID NO: 197242 - DNA, 11 bp, Unknown
  misc_feature (1)..( 11): Result.006 file - promoters50/5663805
caaaaaataaa

SEQ ID NO: 197243 - DNA, 11 bp, Unknown
  misc_feature (1)..( 11): Result.006 file - promoters50/5663805
ataatgaaaac

SEQ ID NO: 197244 - DNA, 11 bp, Unknown
  misc_feature (1)..( 11): Result.006 file - promoters50/5663805
aaatatatatc

SEQ ID NO: 197245 - DNA, 11 bp, Unknown
  misc_feature (1)..( 11): Result.006 file - promoters50/5663805
caatttattta

SEQ ID NO: 197246 - DNA, 11 bp, Unknown
  misc_feature (1)..( 11): Result.006 file - promoters50/5663805
caataaatatg

SEQ ID NO: 197247 - DNA, 11 bp, Unknown
  misc_feature (1)..( 11): Result.006 file - promoters50/5663805
cgctttgtttc

SEQ ID NO: 197248 - DNA, 11 bp, Unknown
  misc_feature (1)..( 11): Result.006 file - promoters50/5663805
aattttctttc

SEQ ID NO: 197249 - DNA, 11 bp, Unknown
  misc_feature (1)..( 11): Result.006 file - promoters50/5663841
aaataaggaat

SEQ ID NO: 197250 - DNA, 7 bp, Unknown
  misc_feature (1)..( 7): Result.006 file - promoters50/5663841
taaaacg

SEQ ID NO: 197251 - DNA, 7 bp, Unknown
  misc_feature (1)..( 7): Result.006 file - promoters50/5663841
caaaacg

SEQ ID NO: 197252 - DNA, 7 bp, Unknown
  misc_feature (1)..( 7): Result.006 file - promoters50/5663841
taaaaca

SEQ ID NO: 197253 - DNA, 10 bp, Unknown
  misc_feature (1)..( 10): Result.006 file - promoters50/5663841
ttgttttctt

SEQ ID NO: 197254 - DNA, 10 bp, Unknown
  misc_feature (1)..( 10): Result.006 file - promoters50/5663841
ttatttactt

SEQ ID NO: 197255 - DNA, 10 bp, Unknown
  misc_feature (1)..( 10): Result.006 file - promoters50/5663847
ttaattacta

SEQ ID NO: 197256 - DNA, 9 bp, Unknown
  misc_feature (1)..( 9): Result.006 file - promoters50/5663847
aaatctaat

SEQ ID NO: 197257 - DNA, 9 bp, Unknown
  misc_feature (1)..( 9): Result.006 file - promoters50/5663847
aaatctttt

SEQ ID NO: 197258 - DNA, 9 bp, Unknown
  misc_feature (1)..( 9): Result.006 file - promoters50/5663847
aaatatttt

SEQ ID NO: 197259 - DNA, 9 bp, Unknown
  misc_feature (1)..( 9): Result.006 file - promoters50/5663847
ttttaaata

SEQ ID NO: 197260 - DNA, 9 bp, Unknown
  misc_feature (1)..( 9): Result.006 file - promoters50/5663847
ttttaaaga

SEQ ID NO: 197261 - DNA, 9 bp, Unknown
  misc_feature (1)..( 9): Result.006 file - promoters50/5663847
tgttaaata

SEQ ID NO: 197262 - DNA, 9 bp, Unknown
  misc_feature (1)..( 9): Result.006 file - promoters50/5663847
acattaaca

SEQ ID NO: 197263 - DNA, 9 bp, Unknown
  misc_feature (1)..( 9): Result.006 file - promoters50/5663847
ttgttaaca

SEQ ID NO: 197264 - DNA, 9 bp, Unknown
  misc_feature (1)..( 9): Result.006 file - promoters50/5663847
acatcaaca

SEQ ID NO: 197265 - DNA, 6 bp, Unknown
  misc_feature (1)..( 6): Result.006 file - promoters50/5663847
atataa

SEQ ID NO: 197266 - DNA, 6 bp, Unknown
  misc_feature (1)..( 6): Result.006 file - promoters50/5663847
atataa

SEQ ID NO: 197267 - DNA, 6 bp, Unknown
  misc_feature (1)..( 6): Result.006 file - promoters50/5663847
atataa

SEQ ID NO: 197268 - DNA, 12 bp, Unknown
  misc_feature (1)..( 12): Result.006 file - promoters50/5663847
aaagattttttt

SEQ ID NO: 197269 - DNA, 12 bp, Unknown
  misc_feature (1)..( 12): Result.006 file - promoters50/5663847
aaagattctaac

SEQ ID NO: 197270 - DNA, 12 bp, Unknown
  misc_feature (1)..( 12): Result.006 file - promoters50/5663847
tcagattgtttt

SEQ ID NO: 197271 - DNA, 9 bp, Unknown
  misc_feature (1)..( 9): Result.006 file - promoters50/5663847
ttttataaa

SEQ ID NO: 197272 - DNA, 9 bp, Unknown
  misc_feature (1)..( 9): Result.006 file - promoters50/5663847
ctttctaat

SEQ ID NO: 197273 - DNA, 10 bp, Unknown
  misc_feature (1)..( 10): Result.006 file - promoters50/5663847
ttttaataaa

SEQ ID NO: 197274 - DNA, 10 bp, Unknown
  misc_feature (1)..( 10): Result.006 file - promoters50/5663847
caaatataaa

SEQ ID NO: 197275 - DNA, 8 bp, Unknown
  misc_feature (1)..( 8): Result.006 file - promoters50/5663847
aaagaaaa

SEQ ID NO: 197276 - DNA, 8 bp, Unknown
  misc_feature (1)..( 8): Result.006 file - promoters50/5663847
aaataaaa

SEQ ID NO: 197277 - DNA, 8 bp, Unknown
  misc_feature (1)..( 8): Result.006 file - promoters50/5663847
atataaaa

SEQ ID NO: 197278 - DNA, 8 bp, Unknown
  misc_feature (1)..( 8): Result.006 file - promoters50/5663847
atcctgta

SEQ ID NO: 197279 - DNA, 8 bp, Unknown
  misc_feature (1)..( 8): Result.006 file - promoters50/5663847
gtccagta

SEQ ID NO: 197280 - DNA, 8 bp, Unknown
  misc_feature (1)..( 8): Result.006 file - promoters50/5663847
atcgtgtc

SEQ ID NO: 197281 - DNA, 9 bp, Unknown
  misc_feature (1)..( 9): Result.006 file - promoters50/5663847
tttgtaaaa

SEQ ID NO: 197282 - DNA, 9 bp, Unknown
  misc_feature (1)..( 9): Result.006 file - promoters50/5663847
cttgtgaaa

SEQ ID NO: 197283 - DNA, 9 bp, Unknown
  misc_feature (1)..( 9): Result.006 file - promoters50/5663847
tttttaaaa

SEQ ID NO: 197284 - DNA, 9 bp, Unknown
  misc_feature (1)..( 9): Result.006 file - promoters50/5663847
tagtatttt

SEQ ID NO: 197285 - DNA, 9 bp, Unknown
  misc_feature (1)..( 9): Result.006 file - promoters50/5663847
aaatatttt

SEQ ID NO: 197286 - DNA, 9 bp, Unknown
  misc_feature (1)..( 9): Result.006 file - promoters50/5663851
aaatctttt

SEQ ID NO: 197287 - DNA, 9 bp, Unknown
  misc_feature (1)..( 9): Result.006 file - promoters50/5663851
aaaatgact

SEQ ID NO: 197288 - DNA, 9 bp, Unknown
  misc_feature (1)..( 9): Result.006 file - promoters50/5663851
aaaatgtga

SEQ ID NO: 197289 - DNA, 9 bp, Unknown
  misc_feature (1)..( 9): Result.006 file - promoters50/5663862
aaaaaggtg

SEQ ID NO: 197290 - DNA, 12 bp, Unknown
  misc_feature (1)..( 12): Result.006 file - promoters50/5663862
gggatttgattg

SEQ ID NO: 197291 - DNA, 12 bp, Unknown
  misc_feature (1)..( 12): Result.006 file - promoters50/5663862
acgatttaattc

SEQ ID NO: 197292 - DNA, 12 bp, Unknown
  misc_feature (1)..( 12): Result.006 file - promoters50/5663862
aagatttgaaag

SEQ ID NO: 197293 - DNA, 12 bp, Unknown
  misc_feature (1)..( 12): Result.006 file - promoters50/5663862
tttttttaattg

SEQ ID NO: 197294 - DNA, 12 bp, Unknown
  misc_feature (1)..( 12): Result.006 file - promoters50/5663862
tcaaattgattt

SEQ ID NO: 197295 - DNA, 12 bp, Unknown
  misc_feature (1)..( 12): Result.006 file - promoters50/5663862
aaggtttcattc

SEQ ID NO: 197296 - DNA, 10 bp, Unknown
  misc_feature (1)..( 10): Result.006 file - promoters50/5663862
aattttaaat

SEQ ID NO: 197297 - DNA, 10 bp, Unknown
  misc_feature (1)..( 10): Result.006 file - promoters50/5663862
aatttttgta

SEQ ID NO: 197298 - DNA, 10 bp, Unknown
  misc_feature (1)..( 10): Result.006 file - promoters50/5663862
tatttttaat

SEQ ID NO: 197299 - DNA, 10 bp, Unknown
  misc_feature (1)..( 10): Result.006 file - promoters50/5663862
aatctttcga

SEQ ID NO: 197300 - DNA, 10 bp, Unknown
  misc_feature (1)..( 10): Result.006 file - promoters50/5663862
aatgtttaca

SEQ ID NO: 197301 - DNA, 10 bp, Unknown
  misc_feature (1)..( 10): Result.006 file - promoters50/5663865
tattttttct

SEQ ID NO: 197302 - DNA, 10 bp, Unknown
  misc_feature (1)..( 10): Result.006 file - promoters50/5663865
aaccagacaa

SEQ ID NO: 197303 - DNA, 10 bp, Unknown
  misc_feature (1)..( 10): Result.006 file - promoters50/5663865
aaccatacag

SEQ ID NO: 197304 - DNA, 10 bp, Unknown
  misc_feature (1)..( 10): Result.006 file - promoters50/5663865
taccaaacaa

SEQ ID NO: 197305 - DNA, 9 bp, Unknown
  misc_feature (1)..( 9): Result.006 file - promoters50/5663865
aattaacaa

SEQ ID NO: 197306 - DNA, 9 bp, Unknown
  misc_feature (1)..( 9): Result.006 file - promoters50/5663865
ggttaacaa

SEQ ID NO: 197307 - DNA, 9 bp, Unknown
  misc_feature (1)..( 9): Result.006 file - promoters50/5663873
aatcaacaa

SEQ ID NO: 197308 - DNA, 8 bp, Unknown
  misc_feature (1)..( 8): Result.006 file - promoters50/5663873
cttgctta

SEQ ID NO: 197309 - DNA, 8 bp, Unknown
  misc_feature (1)..( 8): Result.006 file - promoters50/5663873
tttgttta

SEQ ID NO: 197310 - DNA, 8 bp, Unknown
  misc_feature (1)..( 8): Result.006 file - promoters50/5663873
tttgttct

SEQ ID NO: 197311 - DNA, 7 bp, Unknown
  misc_feature (1)..( 7): Result.006 file - promoters50/5663873
gttttgt

SEQ ID NO: 197312 - DNA, 7 bp, Unknown
  misc_feature (1)..( 7): Result.006 file - promoters50/5663873
tttttgt

SEQ ID NO: 197313 - DNA, 7 bp, Unknown
  misc_feature (1)..( 7): Result.006 file - promoters50/5663881
gttttgg

SEQ ID NO: 197314 - DNA, 10 bp, Unknown
  misc_feature (1)..( 10): Result.006 file - promoters50/5663881
atgatgatga

SEQ ID NO: 197315 - DNA, 10 bp, Unknown
  misc_feature (1)..( 10): Result.006 file - promoters50/5663881
atgatgaatt

SEQ ID NO: 197316 - DNA, 10 bp, Unknown
  misc_feature (1)..( 10): Result.006 file - promoters50/5663884
ttgattaatt

SEQ ID NO: 197317 - DNA, 10 bp, Unknown
  misc_feature (1)..( 10): Result.006 file - promoters50/5663884
gtaacatatt

SEQ ID NO: 197318 - DNA, 10 bp, Unknown
  misc_feature (1)..( 10): Result.006 file - promoters50/5663884
gtatcataat

SEQ ID NO: 197319 - DNA, 10 bp, Unknown
  misc_feature (1)..( 10): Result.006 file - promoters50/5663895
gggtcataat

SEQ ID NO: 197320 - DNA, 7 bp, Unknown
  misc_feature (1)..( 7): Result.006 file - promoters50/5663895
taagtat

SEQ ID NO: 197321 - DNA, 7 bp, Unknown
  misc_feature (1)..( 7): Result.006 file - promoters50/5663895
taaatat

SEQ ID NO: 197322 - DNA, 7 bp, Unknown
  misc_feature (1)..( 7): Result.006 file - promoters50/5663895
aaaatat

SEQ ID NO: 197323 - DNA, 7 bp, Unknown
  misc_feature (1)..( 7): Result.006 file - promoters50/5663895
attgttc

SEQ ID NO: 197324 - DNA, 7 bp, Unknown
  misc_feature (1)..( 7): Result.006 file - promoters50/5663895
attattc

SEQ ID NO: 197325 - DNA, 7 bp, Unknown
  misc_feature (1)..( 7): Result.006 file - promoters50/5663895
tttgttc

SEQ ID NO: 197326 - DNA, 9 bp, Unknown
  misc_feature (1)..( 9): Result.006 file - promoters50/5663895
tataattca

SEQ ID NO: 197327 - DNA, 9 bp, Unknown
  misc_feature (1)..( 9): Result.006 file - promoters50/5663895
tatcattcg

SEQ ID NO: 197328 - DNA, 9 bp, Unknown
  misc_feature (1)..( 9): Result.006 file - promoters50/5663895
gataagtca

SEQ ID NO: 197329 - DNA, 16 bp, Unknown
  misc_feature (1)..( 16): Result.006 file - promoters50/5663895
aatatttatgtttgct

SEQ ID NO: 197330 - DNA, 16 bp, Unknown
  misc_feature (1)..( 16): Result.006 file - promoters50/5663895
accttttatttttaac

SEQ ID NO: 197331 - DNA, 16 bp, Unknown
  misc_feature (1)..( 16): Result.006 file - promoters50/5663895
gatttttttttttttt

SEQ ID NO: 197332 - DNA, 16 bp, Unknown
  misc_feature (1)..( 16): Result.006 file - promoters50/5663895
agagtttttgtttttt

SEQ ID NO: 197333 - DNA, 10 bp, Unknown
  misc_feature (1)..( 10): Result.006 file - promoters50/5663895
acagcaaacc

SEQ ID NO: 197334 - DNA, 10 bp, Unknown
  misc_feature (1)..( 10): Result.006 file - promoters50/5663895
acaacaaaaa

SEQ ID NO: 197335 - DNA, 10 bp, Unknown
  misc_feature (1)..( 10): Result.006 file - promoters50/5663916
taaacaaaaa

SEQ ID NO: 197336 - DNA, 9 bp, Unknown
  misc_feature (1)..( 9): Result.006 file - promoters50/5663916
ctggtatat

SEQ ID NO: 197337 - DNA, 9 bp, Unknown
  misc_feature (1)..( 9): Result.006 file - promoters50/5663916
ctgatataa

SEQ ID NO: 197338 - DNA, 9 bp, Unknown
  misc_feature (1)..( 9): Result.006 file - promoters50/5663916
tttatataa

SEQ ID NO: 197339 - DNA, 8 bp, Unknown
  misc_feature (1)..( 8): Result.006 file - promoters50/5663916
ttttacaa

SEQ ID NO: 197340 - DNA, 8 bp, Unknown
  misc_feature (1)..( 8): Result.006 file - promoters50/5663916
tttgacat

SEQ ID NO: 197341 - DNA, 8 bp, Unknown
  misc_feature (1)..( 8): Result.006 file - promoters50/5663928
gttgtcat

SEQ ID NO: 197342 - DNA, 12 bp, Unknown
  misc_feature (1)..( 12): Result.006 file - promoters50/5663928
aaacattatcgt

SEQ ID NO: 197343 - DNA, 12 bp, Unknown
  misc_feature (1)..( 12): Result.006 file - promoters50/5663928
acccatcatcgt

SEQ ID NO: 197344 - DNA, 12 bp, Unknown
  misc_feature (1)..( 12): Result.006 file - promoters50/5663928
aaacataatctt

SEQ ID NO: 197345 - DNA, 7 bp, Unknown
  misc_feature (1)..( 7): Result.006 file - promoters50/5663928
aatgatt

SEQ ID NO: 197346 - DNA, 7 bp, Unknown
  misc_feature (1)..( 7): Result.006 file - promoters50/5663928
gatgatt

SEQ ID NO: 197347 - DNA, 7 bp, Unknown
  misc_feature (1)..( 7): Result.006 file - promoters50/5663934
gatgatg

SEQ ID NO: 197348 - DNA, 9 bp, Unknown
  misc_feature (1)..( 9): Result.006 file - promoters50/5663934
ttaaataaa

SEQ ID NO: 197349 - DNA, 9 bp, Unknown
  misc_feature (1)..( 9): Result.006 file - promoters50/5663934
agaaaaaaa

SEQ ID NO: 197350 - DNA, 9 bp, Unknown
  misc_feature (1)..( 9): Result.006 file - promoters50/5663934
gtaactaaa

SEQ ID NO: 197351 - DNA, 9 bp, Unknown
  misc_feature (1)..( 9): Result.006 file - promoters50/5663934
ataattaat

SEQ ID NO: 197352 - DNA, 9 bp, Unknown
  misc_feature (1)..( 9): Result.006 file - promoters50/5663934
ctaaagaaa

SEQ ID NO: 197353 - DNA, 9 bp, Unknown
  misc_feature (1)..( 9): Result.006 file - promoters50/5663934
ataatttac

SEQ ID NO: 197354 - DNA, 14 bp, Unknown
  misc_feature (1)..( 14): Result.006 file - promoters50/5663934
ttaaaaagtaattc

SEQ ID NO: 197355 - DNA, 14 bp, Unknown
  misc_feature (1)..( 14): Result.006 file - promoters50/5663934
ttacaaatctatcc

SEQ ID NO: 197356 - DNA, 14 bp, Unknown
  misc_feature (1)..( 14): Result.006 file - promoters50/5663934
aaaaaaagtttttg

SEQ ID NO: 197357 - DNA, 14 bp, Unknown
  misc_feature (1)..( 14): Result.006 file - promoters50/5663934
acacaaatttttac

SEQ ID NO: 197358 - DNA, 14 bp, Unknown
  misc_feature (1)..( 14): Result.006 file - promoters50/5663934
cctcaaacttttat

SEQ ID NO: 197359 - DNA, 14 bp, Unknown
  misc_feature (1)..( 14): Result.006 file - promoters50/5663934
aaacaaacaaaaaa

SEQ ID NO: 197360 - DNA, 13 bp, Unknown
  misc_feature (1)..( 13): Result.006 file - promoters50/5663934
ttaaactttgtct

SEQ ID NO: 197361 - DNA, 13 bp, Unknown
  misc_feature (1)..( 13): Result.006 file - promoters50/5663934
atttactttggaa

SEQ ID NO: 197362 - DNA, 13 bp, Unknown
  misc_feature (1)..( 13): Result.006 file - promoters50/5663934
ttaaattttggta

SEQ ID NO: 197363 - DNA, 13 bp, Unknown
  misc_feature (1)..( 13): Result.006 file - promoters50/5663934
attaatttcttct

SEQ ID NO: 197364 - DNA, 13 bp, Unknown
  misc_feature (1)..( 13): Result.006 file - promoters50/5663934
tgcttctttggat

SEQ ID NO: 197365 - DNA, 13 bp, Unknown
  misc_feature (1)..( 13): Result.006 file - promoters50/5663934
tatagagttggat

SEQ ID NO: 197366 - DNA, 10 bp, Unknown
  misc_feature (1)..( 10): Result.006 file - promoters50/5663934
acaaacaaaa

SEQ ID NO: 197367 - DNA, 10 bp, Unknown
  misc_feature (1)..( 10): Result.006 file - promoters50/5663934
aaaaataaac

SEQ ID NO: 197368 - DNA, 10 bp, Unknown
  misc_feature (1)..( 10): Result.006 file - promoters50/5663934
agtaacaaaa

SEQ ID NO: 197369 - DNA, 10 bp, Unknown
  misc_feature (1)..( 10): Result.006 file - promoters50/5663934
ggacataacc

SEQ ID NO: 197370 - DNA, 10 bp, Unknown
  misc_feature (1)..( 10): Result.006 file - promoters50/5663934
aaaaatactt

SEQ ID NO: 197371 - DNA, 10 bp, Unknown
  misc_feature (1)..( 10): Result.006 file - promoters50/5663934
agaaaaaaat

SEQ ID NO: 197372 - DNA, 10 bp, Unknown
  misc_feature (1)..( 10): Result.006 file - promoters50/5663934
cttaattaaa

SEQ ID NO: 197373 - DNA, 9 bp, Unknown
  misc_feature (1)..( 9): Result.006 file - promoters50/5663934
ttaatttcc

SEQ ID NO: 197374 - DNA, 10 bp, Unknown
  misc_feature (1)..( 10): Result.006 file - promoters50/5663934
agtaactaaa

SEQ ID NO: 197375 - DNA, 10 bp, Unknown
  misc_feature (1)..( 10): Result.006 file - promoters50/5663934
tataattaat

SEQ ID NO: 197376 - DNA, 10 bp, Unknown
  misc_feature (1)..( 10): Result.006 file - promoters50/5663934
cttaatgttt

SEQ ID NO: 197377 - DNA, 10 bp, Unknown
  misc_feature (1)..( 10): Result.006 file - promoters50/5663934
aataatttac

SEQ ID NO: 197378 - DNA, 10 bp, Unknown
  misc_feature (1)..( 10): Result.006 file - promoters50/5663934
gttgactaaa

SEQ ID NO: 197379 - DNA, 11 bp, Unknown
  misc_feature (1)..( 11): Result.006 file - promoters50/5663934
gataaatattc

SEQ ID NO: 197380 - DNA, 11 bp, Unknown
  misc_feature (1)..( 11): Result.006 file - promoters50/5663934
ataaaaaattt

SEQ ID NO: 197381 - DNA, 11 bp, Unknown
  misc_feature (1)..( 11): Result.006 file - promoters50/5663934
atgaaattttt

SEQ ID NO: 197382 - DNA, 11 bp, Unknown
  misc_feature (1)..( 11): Result.006 file - promoters50/5663934
ctatcattttt

SEQ ID NO: 197383 - DNA, 11 bp, Unknown
  misc_feature (1)..( 11): Result.006 file - promoters50/5663934
aagaaaaaaaa

SEQ ID NO: 197384 - DNA, 11 bp, Unknown
  misc_feature (1)..( 11): Result.006 file - promoters50/5663934
aagaaacaaag

SEQ ID NO: 197385 - DNA, 11 bp, Unknown
  misc_feature (1)..( 11): Result.006 file - promoters50/5663934
tcgaaccaatc

SEQ ID NO: 197386 - DNA, 13 bp, Unknown
  misc_feature (1)..( 13): Result.006 file - promoters50/5663934
agacctaagttta

SEQ ID NO: 197387 - DNA, 13 bp, Unknown
  misc_feature (1)..( 13): Result.006 file - promoters50/5663934
ttgtataatttta

SEQ ID NO: 197388 - DNA, 13 bp, Unknown
  misc_feature (1)..( 13): Result.006 file - promoters50/5663934
tgacataaatttt

SEQ ID NO: 197389 - DNA, 13 bp, Unknown
  misc_feature (1)..( 13): Result.006 file - promoters50/5663934
acaaagaattttt

SEQ ID NO: 197390 - DNA, 13 bp, Unknown
  misc_feature (1)..( 13): Result.006 file - promoters50/5663934
caacaaaaacaag

SEQ ID NO: 197391 - DNA, 13 bp, Unknown
  misc_feature (1)..( 13): Result.006 file - promoters50/5663946
tgatatattgttc

SEQ ID NO: 197392 - DNA, 8 bp, Unknown
  misc_feature (1)..( 8): Result.006 file - promoters50/5663946
taaagaaa

SEQ ID NO: 197393 - DNA, 8 bp, Unknown
  misc_feature (1)..( 8): Result.006 file - promoters50/5663946
gaaataaa

SEQ ID NO: 197394 - DNA, 8 bp, Unknown
  misc_feature (1)..( 8): Result.006 file - promoters50/5663946
taaagagc

SEQ ID NO: 197395 - DNA, 8 bp, Unknown
  misc_feature (1)..( 8): Result.006 file - promoters50/5663946
aaaataac

SEQ ID NO: 197396 - DNA, 10 bp, Unknown
  misc_feature (1)..( 10): Result.006 file - promoters50/5663946
tcaatttttc

SEQ ID NO: 197397 - DNA, 10 bp, Unknown
  misc_feature (1)..( 10): Result.006 file - promoters50/5663946
atgattttta

SEQ ID NO: 197398 - DNA, 10 bp, Unknown
  misc_feature (1)..( 10): Result.006 file - promoters50/5663946
cttattcttc

SEQ ID NO: 197399 - DNA, 10 bp, Unknown
  misc_feature (1)..( 10): Result.006 file - promoters50/5663946
cttagtcttt

SEQ ID NO: 197400 - DNA, 7 bp, Unknown
  misc_feature (1)..( 7): Result.006 file - promoters50/5663946
tttcttc

SEQ ID NO: 197401 - DNA, 7 bp, Unknown
  misc_feature (1)..( 7): Result.006 file - promoters50/5663946
tttctta

SEQ ID NO: 197402 - DNA, 7 bp, Unknown
  misc_feature (1)..( 7): Result.006 file - promoters50/5663946
tttcttc

SEQ ID NO: 197403 - DNA, 8 bp, Unknown
  misc_feature (1)..( 8): Result.006 file - promoters50/5663946
tttccttt

SEQ ID NO: 197404 - DNA, 12 bp, Unknown
  misc_feature (1)..( 12): Result.006 file - promoters50/5663946
aatttggtctta

SEQ ID NO: 197405 - DNA, 12 bp, Unknown
  misc_feature (1)..( 12): Result.006 file - promoters50/5663946
cattttgtccga

SEQ ID NO: 197406 - DNA, 12 bp, Unknown
  misc_feature (1)..( 12): Result.006 file - promoters50/5663946
aatttggttttg

SEQ ID NO: 197407 - DNA, 12 bp, Unknown
  misc_feature (1)..( 12): Result.006 file - promoters50/5663950
gtacttgttttt

SEQ ID NO: 197408 - DNA, 12 bp, Unknown
  misc_feature (1)..( 12): Result.006 file - promoters50/5663950
taaaaatttact

SEQ ID NO: 197409 - DNA, 12 bp, Unknown
  misc_feature (1)..( 12): Result.006 file - promoters50/5663950
aaaagatttgat

SEQ ID NO: 197410 - DNA, 12 bp, Unknown
  misc_feature (1)..( 12): Result.006 file - promoters50/5663950
cataaatttttt

SEQ ID NO: 197411 - DNA, 12 bp, Unknown
  misc_feature (1)..( 12): Result.006 file - promoters50/5663950
taaaaattatac

SEQ ID NO: 197412 - DNA, 12 bp, Unknown
  misc_feature (1)..( 12): Result.006 file - promoters50/5663950
ataagattgccg

SEQ ID NO: 197413 - DNA, 12 bp, Unknown
  misc_feature (1)..( 12): Result.006 file - promoters50/5663950
tacagattggtt

SEQ ID NO: 197414 - DNA, 12 bp, Unknown
  misc_feature (1)..( 12): Result.006 file - promoters50/5663954
cttcgattgttt

SEQ ID NO: 197415 - DNA, 11 bp, Unknown
  misc_feature (1)..( 11): Result.006 file - promoters50/5663954
ttgtctgagaa

SEQ ID NO: 197416 - DNA, 11 bp, Unknown
  misc_feature (1)..( 11): Result.006 file - promoters50/5663954
gaaattgagaa

SEQ ID NO: 197417 - DNA, 11 bp, Unknown
  misc_feature (1)..( 11): Result.006 file - promoters50/5663954
aattcttagaa

SEQ ID NO: 197418 - DNA, 11 bp, Unknown
  misc_feature (1)..( 11): Result.006 file - promoters50/5663954
aatacttacaa

SEQ ID NO: 197419 - DNA, 11 bp, Unknown
  misc_feature (1)..( 11): Result.006 file - promoters50/5663954
gtttcctagct

SEQ ID NO: 197420 - DNA, 11 bp, Unknown
  misc_feature (1)..( 11): Result.006 file - promoters50/5663954
aatactcgaag

SEQ ID NO: 197421 - DNA, 11 bp, Unknown
  misc_feature (1)..( 11): Result.006 file - promoters50/5663954
gaacatttttt

SEQ ID NO: 197422 - DNA, 11 bp, Unknown
  misc_feature (1)..( 11): Result.006 file - promoters50/5663954
gattgtttttt

SEQ ID NO: 197423 - DNA, 11 bp, Unknown
  misc_feature (1)..( 11): Result.006 file - promoters50/5663954
ttttgtttttg

SEQ ID NO: 197424 - DNA, 11 bp, Unknown
  misc_feature (1)..( 11): Result.006 file - promoters50/5663954
tttagttttaa

SEQ ID NO: 197425 - DNA, 11 bp, Unknown
  misc_feature (1)..( 11): Result.006 file - promoters50/5663954
cagagttttaa

SEQ ID NO: 197426 - DNA, 11 bp, Unknown
  misc_feature (1)..( 11): Result.006 file - promoters50/5663978
aaaagtttttg

SEQ ID NO: 197427 - DNA, 10 bp, Unknown
  misc_feature (1)..( 10): Result.006 file - promoters50/5663978
aggtaagatt

SEQ ID NO: 197428 - DNA, 10 bp, Unknown
  misc_feature (1)..( 10): Result.006 file - promoters50/5663978
tggtaacatt

SEQ ID NO: 197429 - DNA, 10 bp, Unknown
  misc_feature (1)..( 10): Result.006 file - promoters50/5663982
tggtaaagac

SEQ ID NO: 197430 - DNA, 8 bp, Unknown
  misc_feature (1)..( 8): Result.006 file - promoters50/5663982
agaaaatg

SEQ ID NO: 197431 - DNA, 8 bp, Unknown
  misc_feature (1)..( 8): Result.006 file - promoters50/5663982
agaaaaga

SEQ ID NO: 197432 - DNA, 8 bp, Unknown
  misc_feature (1)..( 8): Result.006 file - promoters50/5663982
agaaaaga

SEQ ID NO: 197433 - DNA, 9 bp, Unknown
  misc_feature (1)..( 9): Result.006 file - promoters50/5663982
gaaaatgat

SEQ ID NO: 197434 - DNA, 9 bp, Unknown
  misc_feature (1)..( 9): Result.006 file - promoters50/5663982
agaaaagat

SEQ ID NO: 197435 - DNA, 9 bp, Unknown
  misc_feature (1)..( 9): Result.006 file - promoters50/5663982
agaaaagaa

SEQ ID NO: 197436 - DNA, 9 bp, Unknown
  misc_feature (1)..( 9): Result.006 file - promoters50/5663982
agtggggtt

SEQ ID NO: 197437 - DNA, 9 bp, Unknown
  misc_feature (1)..( 9): Result.006 file - promoters50/5663982
tatggtgtt

SEQ ID NO: 197438 - DNA, 9 bp, Unknown
  misc_feature (1)..( 9): Result.006 file - promoters50/5663982
tatcgtgca

SEQ ID NO: 197439 - DNA, 7 bp, Unknown
  misc_feature (1)..( 7): Result.006 file - promoters50/5663982
aaacatt

SEQ ID NO: 197440 - DNA, 7 bp, Unknown
  misc_feature (1)..( 7): Result.006 file - promoters50/5663982
aaacata

SEQ ID NO: 197441 - DNA, 7 bp, Unknown
  misc_feature (1)..( 7): Result.006 file - promoters50/5663985
aaagata

SEQ ID NO: 197442 - DNA, 11 bp, Unknown
  misc_feature (1)..( 11): Result.006 file - promoters50/5663985
cgttttggtta

SEQ ID NO: 197443 - DNA, 11 bp, Unknown
  misc_feature (1)..( 11): Result.006 file - promoters50/5663985
catttttgtta

SEQ ID NO: 197444 - DNA, 11 bp, Unknown
  misc_feature (1)..( 11): Result.006 file - promoters50/5663985
cgtttcggtca

SEQ ID NO: 197445 - DNA, 11 bp, Unknown
  misc_feature (1)..( 11): Result.006 file - promoters50/5663985
aatttttagaa

SEQ ID NO: 197446 - DNA, 11 bp, Unknown
  misc_feature (1)..( 11): Result.006 file - promoters50/5663985
tctttttggtt

SEQ ID NO: 197447 - DNA, 11 bp, Unknown
  misc_feature (1)..( 11): Result.006 file - promoters50/5663985
ttttttggttt

SEQ ID NO: 197448 - DNA, 15 bp, Unknown
  misc_feature (1)..( 15): Result.006 file - promoters50/5663985
tttgttatcttgcaa

SEQ ID NO: 197449 - DNA, 15 bp, Unknown
  misc_feature (1)..( 15): Result.006 file - promoters50/5663985
tttattattttgaag

SEQ ID NO: 197450 - DNA, 15 bp, Unknown
  misc_feature (1)..( 15): Result.006 file - promoters50/5663985
aaatgtattttgatt

SEQ ID NO: 197451 - DNA, 15 bp, Unknown
  misc_feature (1)..( 15): Result.006 file - promoters50/5663985
tttttttttttggtt

SEQ ID NO: 197452 - DNA, 15 bp, Unknown
  misc_feature (1)..( 15): Result.006 file - promoters50/5663985
aaccaaattttaaag

SEQ ID NO: 197453 - DNA, 15 bp, Unknown
  misc_feature (1)..( 15): Result.006 file - promoters50/5663985
caatcaatttttttt

SEQ ID NO: 197454 - DNA, 15 bp, Unknown
  misc_feature (1)..( 15): Result.006 file - promoters50/5663985
cagagtgtatttgac

SEQ ID NO: 197455 - DNA, 15 bp, Unknown
  misc_feature (1)..( 15): Result.006 file - promoters50/5663985
aataggattgtaaca

SEQ ID NO: 197456 - DNA, 9 bp, Unknown
  misc_feature (1)..( 9): Result.006 file - promoters50/5663985
gatttatta

SEQ ID NO: 197457 - DNA, 9 bp, Unknown
  misc_feature (1)..( 9): Result.006 file - promoters50/5663985
tattcattt

SEQ ID NO: 197458 - DNA, 9 bp, Unknown
  misc_feature (1)..( 9): Result.006 file - promoters50/5663985
tttttttta

SEQ ID NO: 197459 - DNA, 9 bp, Unknown
  misc_feature (1)..( 9): Result.006 file - promoters50/5663985
gatttatta

SEQ ID NO: 197460 - DNA, 9 bp, Unknown
  misc_feature (1)..( 9): Result.006 file - promoters50/5663985
ttttgatta

SEQ ID NO: 197461 - DNA, 9 bp, Unknown
  misc_feature (1)..( 9): Result.006 file - promoters50/5663996
attttaaag

SEQ ID NO: 197462 - DNA, 15 bp, Unknown
  misc_feature (1)..( 15): Result.006 file - promoters50/5663996
aatctggaatcaaca

SEQ ID NO: 197463 - DNA, 15 bp, Unknown
  misc_feature (1)..( 15): Result.006 file - promoters50/5663996
ctctatgaatcatgt

SEQ ID NO: 197464 - DNA, 15 bp, Unknown
  misc_feature (1)..( 15): Result.006 file - promoters50/5663996
tcaaacaaatcaaat

SEQ ID NO: 197465 - DNA, 15 bp, Unknown
  misc_feature (1)..( 15): Result.006 file - promoters50/5663996
gtttatgaatctgct

SEQ ID NO: 197466 - DNA, 15 bp, Unknown
  misc_feature (1)..( 15): Result.006 file - promoters50/5663996
gtttatgaaggggtt

SEQ ID NO: 197467 - DNA, 15 bp, Unknown
  misc_feature (1)..( 15): Result.006 file - promoters50/5663996
acttggtaataatgt

SEQ ID NO: 197468 - DNA, 9 bp, Unknown
  misc_feature (1)..( 9): Result.006 file - promoters50/5663996
caacaatta

SEQ ID NO: 197469 - DNA, 9 bp, Unknown
  misc_feature (1)..( 9): Result.006 file - promoters50/5663996
taacaattt

SEQ ID NO: 197470 - DNA, 9 bp, Unknown
  misc_feature (1)..( 9): Result.006 file - promoters50/5663996
taacgattc

SEQ ID NO: 197471 - DNA, 10 bp, Unknown
  misc_feature (1)..( 10): Result.006 file - promoters50/5663996
caataagtta

SEQ ID NO: 197472 - DNA, 10 bp, Unknown
  misc_feature (1)..( 10): Result.006 file - promoters50/5663996
tgtcaaattt

SEQ ID NO: 197473 - DNA, 10 bp, Unknown
  misc_feature (1)..( 10): Result.006 file - promoters50/5663996
aatcaaatcg

SEQ ID NO: 197474 - DNA, 10 bp, Unknown
  misc_feature (1)..( 10): Result.006 file - promoters50/5663996
agataagttc

SEQ ID NO: 197475 - DNA, 14 bp, Unknown
  misc_feature (1)..( 14): Result.006 file - promoters50/5663996
ctgaatcgagaata

SEQ ID NO: 197476 - DNA, 14 bp, Unknown
  misc_feature (1)..( 14): Result.006 file - promoters50/5663996
ttgaatcaatattt

SEQ ID NO: 197477 - DNA, 14 bp, Unknown
  misc_feature (1)..( 14): Result.006 file - promoters50/5663996
ttgattcaaaattc

SEQ ID NO: 197478 - DNA, 14 bp, Unknown
  misc_feature (1)..( 14): Result.006 file - promoters50/5663996
tatcccaaaaatta

SEQ ID NO: 197479 - DNA, 14 bp, Unknown
  misc_feature (1)..( 14): Result.006 file - promoters50/5663996
cagacttaaaatct

SEQ ID NO: 197480 - DNA, 14 bp, Unknown
  misc_feature (1)..( 14): Result.006 file - promoters50/5664022
agaggtgaaactta

SEQ ID NO: 197481 - DNA, 8 bp, Unknown
  misc_feature (1)..( 8): Result.006 file - promoters50/5664022
acccaaat

SEQ ID NO: 197482 - DNA, 8 bp, Unknown
  misc_feature (1)..( 8): Result.006 file - promoters50/5664022
acccaaaa

SEQ ID NO: 197483 - DNA, 8 bp, Unknown
  misc_feature (1)..( 8): Result.006 file - promoters50/5664022
accaaaaa

SEQ ID NO: 197484 - DNA, 8 bp, Unknown
  misc_feature (1)..( 8): Result.006 file - promoters50/5664049
gccaaaaa

SEQ ID NO: 197485 - DNA, 8 bp, Unknown
  misc_feature (1)..( 8): Result.006 file - promoters50/5664049
acttattc

SEQ ID NO: 197486 - DNA, 8 bp, Unknown
  misc_feature (1)..( 8): Result.006 file - promoters50/5664049
tcttcttc

SEQ ID NO: 197487 - DNA, 8 bp, Unknown
  misc_feature (1)..( 8): Result.006 file - promoters50/5664060
tcttcttc

SEQ ID NO: 197488 - DNA, 11 bp, Unknown
  misc_feature (1)..( 11): Result.006 file - promoters50/5664060
aaacaattttc

SEQ ID NO: 197489 - DNA, 11 bp, Unknown
  misc_feature (1)..( 11): Result.006 file - promoters50/5664060
ttacaaattta

SEQ ID NO: 197490 - DNA, 11 bp, Unknown
  misc_feature (1)..( 11): Result.006 file - promoters50/5664060
gttcaaataat

SEQ ID NO: 197491 - DNA, 11 bp, Unknown
  misc_feature (1)..( 11): Result.006 file - promoters50/5664060
taacaattgaa

SEQ ID NO: 197492 - DNA, 11 bp, Unknown
  misc_feature (1)..( 11): Result.006 file - promoters50/5664060
aaaaaaatcta

SEQ ID NO: 197493 - DNA, 11 bp, Unknown
  misc_feature (1)..( 11): Result.006 file - promoters50/5664060
aaaaagttata

SEQ ID NO: 197494 - DNA, 11 bp, Unknown
  misc_feature (1)..( 11): Result.006 file - promoters50/5664072
acacagtgata

SEQ ID NO: 197495 - DNA, 8 bp, Unknown
  misc_feature (1)..( 8): Result.006 file - promoters50/5664072
atcttttt

SEQ ID NO: 197496 - DNA, 8 bp, Unknown
  misc_feature (1)..( 8): Result.006 file - promoters50/5664072
ctctattt

SEQ ID NO: 197497 - DNA, 8 bp, Unknown
  misc_feature (1)..( 8): Result.006 file - promoters50/5664080
ctccattg

SEQ ID NO: 197498 - DNA, 8 bp, Unknown
  misc_feature (1)..( 8): Result.006 file - promoters50/5664080
tgaagaaa

SEQ ID NO: 197499 - DNA, 8 bp, Unknown
  misc_feature (1)..( 8): Result.006 file - promoters50/5664080
tgatgaac

SEQ ID NO: 197500 - DNA, 8 bp, Unknown
  misc_feature (1)..( 8): Result.006 file - promoters50/5664080
agaaaaaa

SEQ ID NO: 197501 - DNA, 13 bp, Unknown
  misc_feature (1)..( 13): Result.006 file - promoters50/5664080
gaaactttgtgat

SEQ ID NO: 197502 - DNA, 13 bp, Unknown
  misc_feature (1)..( 13): Result.006 file - promoters50/5664080
gaatctttaagcc

SEQ ID NO: 197503 - DNA, 13 bp, Unknown
  misc_feature (1)..( 13): Result.006 file - promoters50/5664080
gaaacaaagaaac

SEQ ID NO: 197504 - DNA, 13 bp, Unknown
  misc_feature (1)..( 13): Result.006 file - promoters50/5664080
ctatctttaccat

SEQ ID NO: 197505 - DNA, 9 bp, Unknown
  misc_feature (1)..( 9): Result.006 file - promoters50/5664080
gcatcaagc

SEQ ID NO: 197506 - DNA, 9 bp, Unknown
  misc_feature (1)..( 9): Result.006 file - promoters50/5664080
acatcaatt

SEQ ID NO: 197507 - DNA, 9 bp, Unknown
  misc_feature (1)..( 9): Result.006 file - promoters50/5664080
acatctatt

SEQ ID NO: 197508 - DNA, 11 bp, Unknown
  misc_feature (1)..( 11): Result.006 file - promoters50/5664080
agatatcttgt

SEQ ID NO: 197509 - DNA, 11 bp, Unknown
  misc_feature (1)..( 11): Result.006 file - promoters50/5664080
agacatcaatt

SEQ ID NO: 197510 - DNA, 11 bp, Unknown
  misc_feature (1)..( 11): Result.006 file - promoters50/5664080
ccacatctatt

SEQ ID NO: 197511 - DNA, 10 bp, Unknown
  misc_feature (1)..( 10): Result.006 file - promoters50/5664080
ctttaaagat

SEQ ID NO: 197512 - DNA, 10 bp, Unknown
  misc_feature (1)..( 10): Result.006 file - promoters50/5664080
cttcaaaatt

SEQ ID NO: 197513 - DNA, 10 bp, Unknown
  misc_feature (1)..( 10): Result.006 file - promoters50/5664084
aatcaaaatt

SEQ ID NO: 197514 - DNA, 8 bp, Unknown
  misc_feature (1)..( 8): Result.006 file - promoters50/5664084
aaaattaa

SEQ ID NO: 197515 - DNA, 8 bp, Unknown
  misc_feature (1)..( 8): Result.006 file - promoters50/5664084
aaagttaa

SEQ ID NO: 197516 - DNA, 8 bp, Unknown
  misc_feature (1)..( 8): Result.006 file - promoters50/5664084
taagttaa

SEQ ID NO: 197517 - DNA, 11 bp, Unknown
  misc_feature (1)..( 11): Result.006 file - promoters50/5664084
ttttaattttt

SEQ ID NO: 197518 - DNA, 11 bp, Unknown
  misc_feature (1)..( 11): Result.006 file - promoters50/5664084
agttaaatttt

SEQ ID NO: 197519 - DNA, 11 bp, Unknown
  misc_feature (1)..( 11): Result.006 file - promoters50/5664084
ttttcattggc

SEQ ID NO: 197520 - DNA, 9 bp, Unknown
  misc_feature (1)..( 9): Result.006 file - promoters50/5664084
gccagaaaa

SEQ ID NO: 197521 - DNA, 9 bp, Unknown
  misc_feature (1)..( 9): Result.006 file - promoters50/5664084
tccataaac

SEQ ID NO: 197522 - DNA, 9 bp, Unknown
  misc_feature (1)..( 9): Result.006 file - promoters50/5664084
aaaagaaaa

SEQ ID NO: 197523 - DNA, 9 bp, Unknown
  misc_feature (1)..( 9): Result.006 file - promoters50/5664084
tccaaaaat

SEQ ID NO: 197524 - DNA, 10 bp, Unknown
  misc_feature (1)..( 10): Result.006 file - promoters50/5664084
tccaaaggat

SEQ ID NO: 197525 - DNA, 10 bp, Unknown
  misc_feature (1)..( 10): Result.006 file - promoters50/5664084
atcaaatgat

SEQ ID NO: 197526 - DNA, 10 bp, Unknown
  misc_feature (1)..( 10): Result.006 file - promoters50/5664084
atctaattga

SEQ ID NO: 197527 - DNA, 6 bp, Unknown
  misc_feature (1)..( 6): Result.006 file - promoters50/5664084
atataa

SEQ ID NO: 197528 - DNA, 6 bp, Unknown
  misc_feature (1)..( 6): Result.006 file - promoters50/5664084
atataa

SEQ ID NO: 197529 - DNA, 6 bp, Unknown
  misc_feature (1)..( 6): Result.006 file - promoters50/5664084
atataa

SEQ ID NO: 197530 - DNA, 8 bp, Unknown
  misc_feature (1)..( 8): Result.006 file - promoters50/5664084
tgtctctc

SEQ ID NO: 197531 - DNA, 8 bp, Unknown
  misc_feature (1)..( 8): Result.006 file - promoters50/5664084
tgtttctt

SEQ ID NO: 197532 - DNA, 8 bp, Unknown
  misc_feature (1)..( 8): Result.006 file - promoters50/5664088
tgtatctt

SEQ ID NO: 197533 - DNA, 9 bp, Unknown
  misc_feature (1)..( 9): Result.006 file - promoters50/5664088
gtagaaaaa

SEQ ID NO: 197534 - DNA, 9 bp, Unknown
  misc_feature (1)..( 9): Result.006 file - promoters50/5664088
agagaaaaa

SEQ ID NO: 197535 - DNA, 9 bp, Unknown
  misc_feature (1)..( 9): Result.006 file - promoters50/5664088
gtagcaaat

SEQ ID NO: 197536 - DNA, 11 bp, Unknown
  misc_feature (1)..( 11): Result.006 file - promoters50/5664088
gcatcaattaa

SEQ ID NO: 197537 - DNA, 11 bp, Unknown
  misc_feature (1)..( 11): Result.006 file - promoters50/5664088
gcatccattag

SEQ ID NO: 197538 - DNA, 11 bp, Unknown
  misc_feature (1)..( 11): Result.006 file - promoters50/5664088
gtaacaactaa

SEQ ID NO: 197539 - DNA, 11 bp, Unknown
  misc_feature (1)..( 11): Result.006 file - promoters50/5664088
gataaataata

SEQ ID NO: 197540 - DNA, 11 bp, Unknown
  misc_feature (1)..( 11): Result.006 file - promoters50/5664088
gcacaataatt

SEQ ID NO: 197541 - DNA, 11 bp, Unknown
  misc_feature (1)..( 11): Result.006 file - promoters50/5664088
aaaaaataaaa

SEQ ID NO: 197542 - DNA, 7 bp, Unknown
  misc_feature (1)..( 7): Result.006 file - promoters50/5664088
aaaatat

SEQ ID NO: 197543 - DNA, 7 bp, Unknown
  misc_feature (1)..( 7): Result.006 file - promoters50/5664088
gaaatat

SEQ ID NO: 197544 - DNA, 7 bp, Unknown
  misc_feature (1)..( 7): Result.006 file - promoters50/5664092
gaaataa

SEQ ID NO: 197545 - DNA, 9 bp, Unknown
  misc_feature (1)..( 9): Result.006 file - promoters50/5664092
tgatttgtt

SEQ ID NO: 197546 - DNA, 9 bp, Unknown
  misc_feature (1)..( 9): Result.006 file - promoters50/5664092
tgatttgaa

SEQ ID NO: 197547 - DNA, 9 bp, Unknown
  misc_feature (1)..( 9): Result.006 file - promoters50/5664092
gaatttgaa

SEQ ID NO: 197548 - DNA, 9 bp, Unknown
  misc_feature (1)..( 9): Result.006 file - promoters50/5664092
cactttgaa

SEQ ID NO: 197549 - DNA, 8 bp, Unknown
  misc_feature (1)..( 8): Result.006 file - promoters50/5664092
gaaaaaat

SEQ ID NO: 197550 - DNA, 8 bp, Unknown
  misc_feature (1)..( 8): Result.006 file - promoters50/5664092
gaataaag

SEQ ID NO: 197551 - DNA, 8 bp, Unknown
  misc_feature (1)..( 8): Result.006 file - promoters50/5664095
taaagaat

SEQ ID NO: 197552 - DNA, 7 bp, Unknown
  misc_feature (1)..( 7): Result.006 file - promoters50/5664095
agttatt

SEQ ID NO: 197553 - DNA, 7 bp, Unknown
  misc_feature (1)..( 7): Result.006 file - promoters50/5664095
agtcatt

SEQ ID NO: 197554 - DNA, 7 bp, Unknown
  misc_feature (1)..( 7): Result.006 file - promoters50/5664115
agtaatt

SEQ ID NO: 197555 - DNA, 8 bp, Unknown
  misc_feature (1)..( 8): Result.006 file - promoters50/5664115
aaactaaa

SEQ ID NO: 197556 - DNA, 8 bp, Unknown
  misc_feature (1)..( 8): Result.006 file - promoters50/5664115
gaaccaaa

SEQ ID NO: 197557 - DNA, 8 bp, Unknown
  misc_feature (1)..( 8): Result.006 file - promoters50/5664115
aaaataat

SEQ ID NO: 197558 - DNA, 9 bp, Unknown
  misc_feature (1)..( 9): Result.006 file - promoters50/5664115
caaaagtta

SEQ ID NO: 197559 - DNA, 9 bp, Unknown
  misc_feature (1)..( 9): Result.006 file - promoters50/5664115
caaaaatta

SEQ ID NO: 197560 - DNA, 9 bp, Unknown
  misc_feature (1)..( 9): Result.006 file - promoters50/5664115
caaaaaaat

SEQ ID NO: 197561 - DNA, 9 bp, Unknown
  misc_feature (1)..( 9): Result.006 file - promoters50/5664115
gatcacatt

SEQ ID NO: 197562 - DNA, 9 bp, Unknown
  misc_feature (1)..( 9): Result.006 file - promoters50/5664115
tatctcatt

SEQ ID NO: 197563 - DNA, 9 bp, Unknown
  misc_feature (1)..( 9): Result.006 file - promoters50/5664115
tatttcaat

SEQ ID NO: 197564 - DNA, 13 bp, Unknown
  misc_feature (1)..( 13): Result.006 file - promoters50/5664115
gaaagaaagaaaa

SEQ ID NO: 197565 - DNA, 13 bp, Unknown
  misc_feature (1)..( 13): Result.006 file - promoters50/5664115
caaaaaaaaaaaa

SEQ ID NO: 197566 - DNA, 13 bp, Unknown
  misc_feature (1)..( 13): Result.006 file - promoters50/5664115
caataaagtagtt

SEQ ID NO: 197567 - DNA, 11 bp, Unknown
  misc_feature (1)..( 11): Result.006 file - promoters50/5664115
ttaataaaacg

SEQ ID NO: 197568 - DNA, 11 bp, Unknown
  misc_feature (1)..( 11): Result.006 file - promoters50/5664115
ttagtaaaacc

SEQ ID NO: 197569 - DNA, 11 bp, Unknown
  misc_feature (1)..( 11): Result.006 file - promoters50/5664115
tcaataaaata

SEQ ID NO: 197570 - DNA, 11 bp, Unknown
  misc_feature (1)..( 11): Result.006 file - promoters50/5664115
tgtgtagaacc

SEQ ID NO: 197571 - DNA, 7 bp, Unknown
  misc_feature (1)..( 7): Result.006 file - promoters50/5664115
atataaa

SEQ ID NO: 197572 - DNA, 7 bp, Unknown
  misc_feature (1)..( 7): Result.006 file - promoters50/5664115
atataaa

SEQ ID NO: 197573 - DNA, 7 bp, Unknown
  misc_feature (1)..( 7): Result.006 file - promoters50/5664126
atataat

SEQ ID NO: 197574 - DNA, 7 bp, Unknown
  misc_feature (1)..( 7): Result.006 file - promoters50/5664126
attctac

SEQ ID NO: 197575 - DNA, 7 bp, Unknown
  misc_feature (1)..( 7): Result.006 file - promoters50/5664126
attatac

SEQ ID NO: 197576 - DNA, 7 bp, Unknown
  misc_feature (1)..( 7): Result.006 file - promoters50/5664126
tttctac

SEQ ID NO: 197577 - DNA, 7 bp, Unknown
  misc_feature (1)..( 7): Result.006 file - promoters50/5664126
gaaaatc

SEQ ID NO: 197578 - DNA, 7 bp, Unknown
  misc_feature (1)..( 7): Result.006 file - promoters50/5664126
gaaaata

SEQ ID NO: 197579 - DNA, 7 bp, Unknown
  misc_feature (1)..( 7): Result.006 file - promoters50/5664126
aaaaatc

SEQ ID NO: 197580 - DNA, 14 bp, Unknown
  misc_feature (1)..( 14): Result.006 file - promoters50/5664126
taattcagaaaaat

SEQ ID NO: 197581 - DNA, 14 bp, Unknown
  misc_feature (1)..( 14): Result.006 file - promoters50/5664126
ggagtcagaaaaat

SEQ ID NO: 197582 - DNA, 14 bp, Unknown
  misc_feature (1)..( 14): Result.006 file - promoters50/5664126
taattgagaatccg

SEQ ID NO: 197583 - DNA, 14 bp, Unknown
  misc_feature (1)..( 14): Result.006 file - promoters50/5664126
tttttctgaaggaa

SEQ ID NO: 197584 - DNA, 8 bp, Unknown
  misc_feature (1)..( 8): Result.006 file - promoters50/5664126
aatatatg

SEQ ID NO: 197585 - DNA, 8 bp, Unknown
  misc_feature (1)..( 8): Result.006 file - promoters50/5664126
aatataaa

SEQ ID NO: 197586 - DNA, 8 bp, Unknown
  misc_feature (1)..( 8): Result.006 file - promoters50/5664126
aatgtaaa

SEQ ID NO: 197587 - DNA, 8 bp, Unknown
  misc_feature (1)..( 8): Result.006 file - promoters50/5664126
aaaattct

SEQ ID NO: 197588 - DNA, 8 bp, Unknown
  misc_feature (1)..( 8): Result.006 file - promoters50/5664126
aaaattgt

SEQ ID NO: 197589 - DNA, 8 bp, Unknown
  misc_feature (1)..( 8): Result.006 file - promoters50/5664126
taaatttc

SEQ ID NO: 197590 - DNA, 8 bp, Unknown
  misc_feature (1)..( 8): Result.006 file - promoters50/5664126
aacagaaa

SEQ ID NO: 197591 - DNA, 8 bp, Unknown
  misc_feature (1)..( 8): Result.006 file - promoters50/5664126
aactgaag

SEQ ID NO: 197592 - DNA, 8 bp, Unknown
  misc_feature (1)..( 8): Result.006 file - promoters50/5664126
aaccgaaa

SEQ ID NO: 197593 - DNA, 7 bp, Unknown
  misc_feature (1)..( 7): Result.006 file - promoters50/5664126
tttattt

SEQ ID NO: 197594 - DNA, 7 bp, Unknown
  misc_feature (1)..( 7): Result.006 file - promoters50/5664126
tttattt

SEQ ID NO: 197595 - DNA, 7 bp, Unknown
  misc_feature (1)..( 7): Result.006 file - promoters50/5664126
tttgttt

SEQ ID NO: 197596 - DNA, 8 bp, Unknown
  misc_feature (1)..( 8): Result.006 file - promoters50/5664126
taatttgt

SEQ ID NO: 197597 - DNA, 8 bp, Unknown
  misc_feature (1)..( 8): Result.006 file - promoters50/5664126
taatttgt

SEQ ID NO: 197598 - DNA, 8 bp, Unknown
  misc_feature (1)..( 8): Result.006 file - promoters50/5664126
agatttgt

SEQ ID NO: 197599 - DNA, 16 bp, Unknown
  misc_feature (1)..( 16): Result.006 file - promoters50/5664126
gttcggttcggtttaa

SEQ ID NO: 197600 - DNA, 16 bp, Unknown
  misc_feature (1)..( 16): Result.006 file - promoters50/5664126
gttcggttcggtttac

SEQ ID NO: 197601 - DNA, 16 bp, Unknown
  misc_feature (1)..( 16): Result.006 file - promoters50/5664126
tgaagagtaagtttac

SEQ ID NO: 197602 - DNA, 9 bp, Unknown
  misc_feature (1)..( 9): Result.006 file - promoters50/5664126
aaaatatat

SEQ ID NO: 197603 - DNA, 9 bp, Unknown
  misc_feature (1)..( 9): Result.006 file - promoters50/5664126
taaatatat

SEQ ID NO: 197604 - DNA, 9 bp, Unknown
  misc_feature (1)..( 9): Result.006 file - promoters50/5664133
aaaataacc

SEQ ID NO: 197605 - DNA, 10 bp, Unknown
  misc_feature (1)..( 10): Result.006 file - promoters50/5664133
gaacttaatt

SEQ ID NO: 197606 - DNA, 10 bp, Unknown
  misc_feature (1)..( 10): Result.006 file - promoters50/5664133
aaacataatt

SEQ ID NO: 197607 - DNA, 10 bp, Unknown
  misc_feature (1)..( 10): Result.006 file - promoters50/5664133
aaacatatcc

SEQ ID NO: 197608 - DNA, 9 bp, Unknown
  misc_feature (1)..( 9): Result.006 file - promoters50/5664133
gtaaacaca

SEQ ID NO: 197609 - DNA, 9 bp, Unknown
  misc_feature (1)..( 9): Result.006 file - promoters50/5664133
ataaacatg

SEQ ID NO: 197610 - DNA, 9 bp, Unknown
  misc_feature (1)..( 9): Result.006 file - promoters50/5664133
ataaaaatg

SEQ ID NO: 197611 - DNA, 8 bp, Unknown
  misc_feature (1)..( 8): Result.006 file - promoters50/5664133
caaacaaa

SEQ ID NO: 197612 - DNA, 8 bp, Unknown
  misc_feature (1)..( 8): Result.006 file - promoters50/5664133
gaaaaaaa

SEQ ID NO: 197613 - DNA, 8 bp, Unknown
  misc_feature (1)..( 8): Result.006 file - promoters50/5664133
caaacata

SEQ ID NO: 197614 - DNA, 8 bp, Unknown
  misc_feature (1)..( 8): Result.006 file - promoters50/5664133
aaaacata

SEQ ID NO: 197615 - DNA, 7 bp, Unknown
  misc_feature (1)..( 7): Result.006 file - promoters50/5664133
caaacaa

SEQ ID NO: 197616 - DNA, 7 bp, Unknown
  misc_feature (1)..( 7): Result.006 file - promoters50/5664133
caaacat

SEQ ID NO: 197617 - DNA, 7 bp, Unknown
  misc_feature (1)..( 7): Result.006 file - promoters50/5664133
caaccat

SEQ ID NO: 197618 - DNA, 7 bp, Unknown
  misc_feature (1)..( 7): Result.006 file - promoters50/5664133
tcacaaa

SEQ ID NO: 197619 - DNA, 7 bp, Unknown
  misc_feature (1)..( 7): Result.006 file - promoters50/5664133
tcacaag

SEQ ID NO: 197620 - DNA, 7 bp, Unknown
  misc_feature (1)..( 7): Result.006 file - promoters50/5664133
ccacaaa

SEQ ID NO: 197621 - DNA, 9 bp, Unknown
  misc_feature (1)..( 9): Result.006 file - promoters50/5664133
aattaagtt

SEQ ID NO: 197622 - DNA, 9 bp, Unknown
  misc_feature (1)..( 9): Result.006 file - promoters50/5664133
aattaaaaa

SEQ ID NO: 197623 - DNA, 9 bp, Unknown
  misc_feature (1)..( 9): Result.006 file - promoters50/5664133
cattaagtt

SEQ ID NO: 197624 - DNA, 8 bp, Unknown
  misc_feature (1)..( 8): Result.006 file - promoters50/5664133
cacaaaac

SEQ ID NO: 197625 - DNA, 8 bp, Unknown
  misc_feature (1)..( 8): Result.006 file - promoters50/5664133
aacaaaac

SEQ ID NO: 197626 - DNA, 8 bp, Unknown
  misc_feature (1)..( 8): Result.006 file - promoters50/5664141
cacaaaca

SEQ ID NO: 197627 - DNA, 11 bp, Unknown
  misc_feature (1)..( 11): Result.006 file - promoters50/5664141
ttattatttac

SEQ ID NO: 197628 - DNA, 11 bp, Unknown
  misc_feature (1)..( 11): Result.006 file - promoters50/5664141
tgatttttttt

SEQ ID NO: 197629 - DNA, 11 bp, Unknown
  misc_feature (1)..( 11): Result.006 file - promoters50/5664141
ctataatttga

SEQ ID NO: 197630 - DNA, 12 bp, Unknown
  misc_feature (1)..( 12): Result.006 file - promoters50/5664141
gtatttgttttc

SEQ ID NO: 197631 - DNA, 12 bp, Unknown
  misc_feature (1)..( 12): Result.006 file - promoters50/5664141
atttgagttttt

SEQ ID NO: 197632 - DNA, 12 bp, Unknown
  misc_feature (1)..( 12): Result.006 file - promoters50/5664141
tgatttgtttgc

SEQ ID NO: 197633 - DNA, 15 bp, Unknown
  misc_feature (1)..( 15): Result.006 file - promoters50/5664141
atcttttttactgta

SEQ ID NO: 197634 - DNA, 15 bp, Unknown
  misc_feature (1)..( 15): Result.006 file - promoters50/5664141
aaagctttaactacg

SEQ ID NO: 197635 - DNA, 15 bp, Unknown
  misc_feature (1)..( 15): Result.006 file - promoters50/5664141
aaagatttaagagac

SEQ ID NO: 197636 - DNA, 15 bp, Unknown
  misc_feature (1)..( 15): Result.006 file - promoters50/5664141
ttatatgaaaggatc

SEQ ID NO: 197637 - DNA, 15 bp, Unknown
  misc_feature (1)..( 15): Result.006 file - promoters50/5664141
ttggattctatgaaa

SEQ ID NO: 197638 - DNA, 15 bp, Unknown
  misc_feature (1)..( 15): Result.006 file - promoters50/5664141
tatcttgcaaggatg

SEQ ID NO: 197639 - DNA, 11 bp, Unknown
  misc_feature (1)..( 11): Result.006 file - promoters50/5664141
aattaaaaata

SEQ ID NO: 197640 - DNA, 11 bp, Unknown
  misc_feature (1)..( 11): Result.006 file - promoters50/5664141
gtataaaaaca

SEQ ID NO: 197641 - DNA, 11 bp, Unknown
  misc_feature (1)..( 11): Result.006 file - promoters50/5664141
atataaatata

SEQ ID NO: 197642 - DNA, 11 bp, Unknown
  misc_feature (1)..( 11): Result.006 file - promoters50/5664141
ttctaaaaaga

SEQ ID NO: 197643 - DNA, 11 bp, Unknown
  misc_feature (1)..( 11): Result.006 file - promoters50/5664141
tattaaacccc

SEQ ID NO: 197644 - DNA, 11 bp, Unknown
  misc_feature (1)..( 11): Result.006 file - promoters50/5664141
tcataaaccct

SEQ ID NO: 197645 - DNA, 10 bp, Unknown
  misc_feature (1)..( 10): Result.006 file - promoters50/5664141
gaataaaaac

SEQ ID NO: 197646 - DNA, 10 bp, Unknown
  misc_feature (1)..( 10): Result.006 file - promoters50/5664141
tgataaaaag

SEQ ID NO: 197647 - DNA, 10 bp, Unknown
  misc_feature (1)..( 10): Result.006 file - promoters50/5664141
caataaaagt

SEQ ID NO: 197648 - DNA, 10 bp, Unknown
  misc_feature (1)..( 10): Result.006 file - promoters50/5664141
tcttaaaaac

SEQ ID NO: 197649 - DNA, 10 bp, Unknown
  misc_feature (1)..( 10): Result.006 file - promoters50/5664141
gattaaatgt

SEQ ID NO: 197650 - DNA, 10 bp, Unknown
  misc_feature (1)..( 10): Result.006 file - promoters50/5664149
ctcgaaaaag

SEQ ID NO: 197651 - DNA, 8 bp, Unknown
  misc_feature (1)..( 8): Result.006 file - promoters50/5664149
ttatgtga

SEQ ID NO: 197652 - DNA, 8 bp, Unknown
  misc_feature (1)..( 8): Result.006 file - promoters50/5664149
ttatgtac

SEQ ID NO: 197653 - DNA, 8 bp, Unknown
  misc_feature (1)..( 8): Result.006 file - promoters50/5664149
atatatac

SEQ ID NO: 197654 - DNA, 7 bp, Unknown
  misc_feature (1)..( 7): Result.006 file - promoters50/5664149
ataatag

SEQ ID NO: 197655 - DNA, 7 bp, Unknown
  misc_feature (1)..( 7): Result.006 file - promoters50/5664149
ataatac

SEQ ID NO: 197656 - DNA, 7 bp, Unknown
  misc_feature (1)..( 7): Result.006 file - promoters50/5664149
ttaatac

SEQ ID NO: 197657 - DNA, 11 bp, Unknown
  misc_feature (1)..( 11): Result.006 file - promoters50/5664149
taaaacaatct

SEQ ID NO: 197658 - DNA, 11 bp, Unknown
  misc_feature (1)..( 11): Result.006 file - promoters50/5664149
taatacattct

SEQ ID NO: 197659 - DNA, 11 bp, Unknown
  misc_feature (1)..( 11): Result.006 file - promoters50/5664153
taataccaacc

SEQ ID NO: 197660 - DNA, 10 bp, Unknown
  misc_feature (1)..( 10): Result.006 file - promoters50/5664153
tagtttaaaa

SEQ ID NO: 197661 - DNA, 10 bp, Unknown
  misc_feature (1)..( 10): Result.006 file - promoters50/5664153
atttttcaaa

SEQ ID NO: 197662 - DNA, 10 bp, Unknown
  misc_feature (1)..( 10): Result.006 file - promoters50/5664153
aaatttgaaa

SEQ ID NO: 197663 - DNA, 10 bp, Unknown
  misc_feature (1)..( 10): Result.006 file - promoters50/5664153
gtgtttcaaa

SEQ ID NO: 197664 - DNA, 10 bp, Unknown
  misc_feature (1)..( 10): Result.006 file - promoters50/5664153
attcttcagt

SEQ ID NO: 197665 - DNA, 8 bp, Unknown
  misc_feature (1)..( 8): Result.006 file - promoters50/5664153
ataccaaa

SEQ ID NO: 197666 - DNA, 8 bp, Unknown
  misc_feature (1)..( 8): Result.006 file - promoters50/5664153
gtactaaa

SEQ ID NO: 197667 - DNA, 8 bp, Unknown
  misc_feature (1)..( 8): Result.006 file - promoters50/5664153
gtaataac

SEQ ID NO: 197668 - DNA, 8 bp, Unknown
  misc_feature (1)..( 8): Result.006 file - promoters50/5664174
ataaaaac

SEQ ID NO: 197669 - DNA, 10 bp, Unknown
  misc_feature (1)..( 10): Result.006 file - promoters50/5664174
atccaagatc

SEQ ID NO: 197670 - DNA, 10 bp, Unknown
  misc_feature (1)..( 10): Result.006 file - promoters50/5664174
atccaatgta

SEQ ID NO: 197671 - DNA, 10 bp, Unknown
  misc_feature (1)..( 10): Result.006 file - promoters50/5664174
atcaaatgta

SEQ ID NO: 197672 - DNA, 10 bp, Unknown
  misc_feature (1)..( 10): Result.006 file - promoters50/5664174
aatcaaagtc

SEQ ID NO: 197673 - DNA, 10 bp, Unknown
  misc_feature (1)..( 10): Result.006 file - promoters50/5664174
aattaaaaaa

SEQ ID NO: 197674 - DNA, 11 bp, Unknown
  misc_feature (1)..( 11): Result.006 file - promoters50/5664174
tattacaaaac

SEQ ID NO: 197675 - DNA, 12 bp, Unknown
  misc_feature (1)..( 12): Result.006 file - promoters50/5664174
tggtaatttaac

SEQ ID NO: 197676 - DNA, 12 bp, Unknown
  misc_feature (1)..( 12): Result.006 file - promoters50/5664174
atccaatgtaac

SEQ ID NO: 197677 - DNA, 12 bp, Unknown
  misc_feature (1)..( 12): Result.006 file - promoters50/5664174
atcaaatgtatt

SEQ ID NO: 197678 - DNA, 8 bp, Unknown
  misc_feature (1)..( 8): Result.006 file - promoters50/5664174
ttttgatt

SEQ ID NO: 197679 - DNA, 8 bp, Unknown
  misc_feature (1)..( 8): Result.006 file - promoters50/5664174
ttttgacg

SEQ ID NO: 197680 - DNA, 8 bp, Unknown
  misc_feature (1)..( 8): Result.006 file - promoters50/5664178
tttttatt

SEQ ID NO: 197681 - DNA, 9 bp, Unknown
  misc_feature (1)..( 9): Result.006 file - promoters50/5664178
tttatatat

SEQ ID NO: 197682 - DNA, 9 bp, Unknown
  misc_feature (1)..( 9): Result.006 file - promoters50/5664178
tttttataa

SEQ ID NO: 197683 - DNA, 9 bp, Unknown
  misc_feature (1)..( 9): Result.006 file - promoters50/5664178
tatatatat

SEQ ID NO: 197684 - DNA, 8 bp, Unknown
  misc_feature (1)..( 8): Result.006 file - promoters50/5664178
taaaagat

SEQ ID NO: 197685 - DNA, 8 bp, Unknown
  misc_feature (1)..( 8): Result.006 file - promoters50/5664178
taaaagaa

SEQ ID NO: 197686 - DNA, 8 bp, Unknown
  misc_feature (1)..( 8): Result.006 file - promoters50/5664178
tgaaagaa

SEQ ID NO: 197687 - DNA, 10 bp, Unknown
  misc_feature (1)..( 10): Result.006 file - promoters50/5664178
aaaaacaaaa

SEQ ID NO: 197688 - DNA, 10 bp, Unknown
  misc_feature (1)..( 10): Result.006 file - promoters50/5664178
aaacacaaac

SEQ ID NO: 197689 - DNA, 10 bp, Unknown
  misc_feature (1)..( 10): Result.006 file - promoters50/5664178
aagtacaaaa

SEQ ID NO: 197690 - DNA, 10 bp, Unknown
  misc_feature (1)..( 10): Result.006 file - promoters50/5664178
ttatttgttt

SEQ ID NO: 197691 - DNA, 10 bp, Unknown
  misc_feature (1)..( 10): Result.006 file - promoters50/5664178
ttatttatac

SEQ ID NO: 197692 - DNA, 10 bp, Unknown
  misc_feature (1)..( 10): Result.006 file - promoters50/5664178
tttttttata

SEQ ID NO: 197693 - DNA, 10 bp, Unknown
  misc_feature (1)..( 10): Result.006 file - promoters50/5664178
aagaggattg

SEQ ID NO: 197694 - DNA, 10 bp, Unknown
  misc_feature (1)..( 10): Result.006 file - promoters50/5664178
gagaggcttg

SEQ ID NO: 197695 - DNA, 10 bp, Unknown
  misc_feature (1)..( 10): Result.006 file - promoters50/5664178
aagatgatgt

SEQ ID NO: 197696 - DNA, 9 bp, Unknown
  misc_feature (1)..( 9): Result.006 file - promoters50/5664178
aaaaaggcc

SEQ ID NO: 197697 - DNA, 9 bp, Unknown
  misc_feature (1)..( 9): Result.006 file - promoters50/5664178
aaaaagagt

SEQ ID NO: 197698 - DNA, 9 bp, Unknown
  misc_feature (1)..( 9): Result.006 file - promoters50/5664186
ttaaaggag

SEQ ID NO: 197699 - DNA, 8 bp, Unknown
  misc_feature (1)..( 8): Result.006 file - promoters50/5664186
ttcttctc

SEQ ID NO: 197700 - DNA, 8 bp, Unknown
  misc_feature (1)..( 8): Result.006 file - promoters50/5664186
ttcttcgt

SEQ ID NO: 197701 - DNA, 8 bp, Unknown
  misc_feature (1)..( 8): Result.006 file - promoters50/5664186
ctcttcgt

SEQ ID NO: 197702 - DNA, 9 bp, Unknown
  misc_feature (1)..( 9): Result.006 file - promoters50/5664186
ctctccacc

SEQ ID NO: 197703 - DNA, 9 bp, Unknown
  misc_feature (1)..( 9): Result.006 file - promoters50/5664186
gtcttcacc

SEQ ID NO: 197704 - DNA, 9 bp, Unknown
  misc_feature (1)..( 9): Result.006 file - promoters50/5664186
ctcaccaag

SEQ ID NO: 197705 - DNA, 9 bp, Unknown
  misc_feature (1)..( 9): Result.006 file - promoters50/5664186
gttcttcgt

SEQ ID NO: 197706 - DNA, 9 bp, Unknown
  misc_feature (1)..( 9): Result.006 file - promoters50/5664186
actcttcgt

SEQ ID NO: 197707 - DNA, 9 bp, Unknown
  misc_feature (1)..( 9): Result.006 file - promoters50/5664186
actattctt

SEQ ID NO: 197708 - DNA, 8 bp, Unknown
  misc_feature (1)..( 8): Result.006 file - promoters50/5664186
taaacatt

SEQ ID NO: 197709 - DNA, 8 bp, Unknown
  misc_feature (1)..( 8): Result.006 file - promoters50/5664186
caaagatt

SEQ ID NO: 197710 - DNA, 8 bp, Unknown
  misc_feature (1)..( 8): Result.006 file - promoters50/5664209
taaacaaa

SEQ ID NO: 197711 - DNA, 7 bp, Unknown
  misc_feature (1)..( 7): Result.006 file - promoters50/5664209
aagaaaa

SEQ ID NO: 197712 - DNA, 7 bp, Unknown
  misc_feature (1)..( 7): Result.006 file - promoters50/5664209
aagtaaa

SEQ ID NO: 197713 - DNA, 7 bp, Unknown
  misc_feature (1)..( 7): Result.006 file - promoters50/5664209
gagtaaa

SEQ ID NO: 197714 - DNA, 10 bp, Unknown
  misc_feature (1)..( 10): Result.006 file - promoters50/5664209
tgatacaatt

SEQ ID NO: 197715 - DNA, 10 bp, Unknown
  misc_feature (1)..( 10): Result.006 file - promoters50/5664209
aaataaaata

SEQ ID NO: 197716 - DNA, 10 bp, Unknown
  misc_feature (1)..( 10): Result.006 file - promoters50/5664209
aaatgaaata

SEQ ID NO: 197717 - DNA, 11 bp, Unknown
  misc_feature (1)..( 11): Result.006 file - promoters50/5664209
agactaataag

SEQ ID NO: 197718 - DNA, 11 bp, Unknown
  misc_feature (1)..( 11): Result.006 file - promoters50/5664209
agagtaaaaag

SEQ ID NO: 197719 - DNA, 11 bp, Unknown
  misc_feature (1)..( 11): Result.006 file - promoters50/5664216
tagataataat

SEQ ID NO: 197720 - DNA, 10 bp, Unknown
  misc_feature (1)..( 10): Result.006 file - promoters50/5664216
acttgacaca

SEQ ID NO: 197721 - DNA, 10 bp, Unknown
  misc_feature (1)..( 10): Result.006 file - promoters50/5664216
atttgataca

SEQ ID NO: 197722 - DNA, 10 bp, Unknown
  misc_feature (1)..( 10): Result.006 file - promoters50/5664216
atttgatcgg

SEQ ID NO: 197723 - DNA, 10 bp, Unknown
  misc_feature (1)..( 10): Result.006 file - promoters50/5664216
atttaataaa

SEQ ID NO: 197724 - DNA, 10 bp, Unknown
  misc_feature (1)..( 10): Result.006 file - promoters50/5664216
tgttgctcgg

SEQ ID NO: 197725 - DNA, 10 bp, Unknown
  misc_feature (1)..( 10): Result.006 file - promoters50/5664216
gtttaatttg

SEQ ID NO: 197726 - DNA, 10 bp, Unknown
  misc_feature (1)..( 10): Result.006 file - promoters50/5664216
ttataaatac

SEQ ID NO: 197727 - DNA, 10 bp, Unknown
  misc_feature (1)..( 10): Result.006 file - promoters50/5664216
atataaatcc

SEQ ID NO: 197728 - DNA, 10 bp, Unknown
  misc_feature (1)..( 10): Result.006 file - promoters50/5664216
ttataaataa

SEQ ID NO: 197729 - DNA, 10 bp, Unknown
  misc_feature (1)..( 10): Result.006 file - promoters50/5664216
agttaaatag

SEQ ID NO: 197730 - DNA, 10 bp, Unknown
  misc_feature (1)..( 10): Result.006 file - promoters50/5664216
ccctaaatac

SEQ ID NO: 197731 - DNA, 10 bp, Unknown
  misc_feature (1)..( 10): Result.006 file - promoters50/5664216
ctatatataa

SEQ ID NO: 197732 - DNA, 11 bp, Unknown
  misc_feature (1)..( 11): Result.006 file - promoters50/5664216
tttttctttct

SEQ ID NO: 197733 - DNA, 11 bp, Unknown
  misc_feature (1)..( 11): Result.006 file - promoters50/5664216
tgtttcttctc

SEQ ID NO: 197734 - DNA, 11 bp, Unknown
  misc_feature (1)..( 11): Result.006 file - promoters50/5664216
gggttctttgc

SEQ ID NO: 197735 - DNA, 11 bp, Unknown
  misc_feature (1)..( 11): Result.006 file - promoters50/5664216
tcttttttttt

SEQ ID NO: 197736 - DNA, 11 bp, Unknown
  misc_feature (1)..( 11): Result.006 file - promoters50/5664216
cgcatcttttt

SEQ ID NO: 197737 - DNA, 11 bp, Unknown
  misc_feature (1)..( 11): Result.006 file - promoters50/5664222
tgtttctgttt

SEQ ID NO: 197738 - DNA, 12 bp, Unknown
  misc_feature (1)..( 12): Result.006 file - promoters50/5664222
tcaattcatttt

SEQ ID NO: 197739 - DNA, 12 bp, Unknown
  misc_feature (1)..( 12): Result.006 file - promoters50/5664222
tacattcacttt

SEQ ID NO: 197740 - DNA, 12 bp, Unknown
  misc_feature (1)..( 12): Result.006 file - promoters50/5664222
tcaattcatagt

SEQ ID NO: 197741 - DNA, 12 bp, Unknown
  misc_feature (1)..( 12): Result.006 file - promoters50/5664263
tggaggcatttt

SEQ ID NO: 197742 - DNA, 9 bp, Unknown
  misc_feature (1)..( 9): Result.006 file - promoters50/5664263
gctaaaatt

SEQ ID NO: 197743 - DNA, 9 bp, Unknown
  misc_feature (1)..( 9): Result.006 file - promoters50/5664263
gctaaattc

SEQ ID NO: 197744 - DNA, 10 bp, Unknown
  misc_feature (1)..( 10): Result.006 file - promoters50/5664263
actagaattt

SEQ ID NO: 197745 - DNA, 10 bp, Unknown
  misc_feature (1)..( 10): Result.006 file - promoters50/5664263
actagattct

SEQ ID NO: 197746 - DNA, 10 bp, Unknown
  misc_feature (1)..( 10): Result.006 file - promoters50/5664263
tctatattgc

SEQ ID NO: 197747 - DNA, 10 bp, Unknown
  misc_feature (1)..( 10): Result.006 file - promoters50/5664263
acttgattca

SEQ ID NO: 197748 - DNA, 10 bp, Unknown
  misc_feature (1)..( 10): Result.006 file - promoters50/5664263
catatattat

SEQ ID NO: 197749 - DNA, 10 bp, Unknown
  misc_feature (1)..( 10): Result.006 file - promoters50/5664263
gatagatttg

SEQ ID NO: 197750 - DNA, 10 bp, Unknown
  misc_feature (1)..( 10): Result.006 file - promoters50/5664263
actagattct

SEQ ID NO: 197751 - DNA, 10 bp, Unknown
  misc_feature (1)..( 10): Result.006 file - promoters50/5664263
catatattat

SEQ ID NO: 197752 - DNA, 10 bp, Unknown
  misc_feature (1)..( 10): Result.006 file - promoters50/5664263
gctaaattct

SEQ ID NO: 197753 - DNA, 10 bp, Unknown
  misc_feature (1)..( 10): Result.006 file - promoters50/5664263
tctatattgc

SEQ ID NO: 197754 - DNA, 10 bp, Unknown
  misc_feature (1)..( 10): Result.006 file - promoters50/5664263
acttgattca

SEQ ID NO: 197755 - DNA, 12 bp, Unknown
  misc_feature (1)..( 12): Result.006 file - promoters50/5664263
agggtttaagag

SEQ ID NO: 197756 - DNA, 12 bp, Unknown
  misc_feature (1)..( 12): Result.006 file - promoters50/5664263
catgtttaatct

SEQ ID NO: 197757 - DNA, 12 bp, Unknown
  misc_feature (1)..( 12): Result.006 file - promoters50/5664263
gatgttgaagtc

SEQ ID NO: 197758 - DNA, 12 bp, Unknown
  misc_feature (1)..( 12): Result.006 file - promoters50/5664263
tctcttttagat

SEQ ID NO: 197759 - DNA, 12 bp, Unknown
  misc_feature (1)..( 12): Result.006 file - promoters50/5664263
tgcttttaatct

SEQ ID NO: 197760 - DNA, 12 bp, Unknown
  misc_feature (1)..( 12): Result.006 file - promoters50/5664263
catatttagcag

SEQ ID NO: 197761 - DNA, 14 bp, Unknown
  misc_feature (1)..( 14): Result.006 file - promoters50/5664263
ccattgttgagaga

SEQ ID NO: 197762 - DNA, 14 bp, Unknown
  misc_feature (1)..( 14): Result.006 file - promoters50/5664263
taattgatgaaaga

SEQ ID NO: 197763 - DNA, 14 bp, Unknown
  misc_feature (1)..( 14): Result.006 file - promoters50/5664263
caattgattctaat

SEQ ID NO: 197764 - DNA, 14 bp, Unknown
  misc_feature (1)..( 14): Result.006 file - promoters50/5664263
aaattgagcaatgt

SEQ ID NO: 197765 - DNA, 14 bp, Unknown
  misc_feature (1)..( 14): Result.006 file - promoters50/5664263
gaatttattcgtat

SEQ ID NO: 197766 - DNA, 14 bp, Unknown
  misc_feature (1)..( 14): Result.006 file - promoters50/5664265
gaatttcataaagc

SEQ ID NO: 197767 - DNA, 11 bp, Unknown
  misc_feature (1)..( 11): Result.006 file - promoters50/5664265
tccctttaatt

SEQ ID NO: 197768 - DNA, 11 bp, Unknown
  misc_feature (1)..( 11): Result.006 file - promoters50/5664265
agattttaata

SEQ ID NO: 197769 - DNA, 12 bp, Unknown
  misc_feature (1)..( 12): Result.006 file - promoters50/5664265
atggtttgaata

SEQ ID NO: 197770 - DNA, 12 bp, Unknown
  misc_feature (1)..( 12): Result.006 file - promoters50/5664265
atggtgtgaatc

SEQ ID NO: 197771 - DNA, 10 bp, Unknown
  misc_feature (1)..( 10): Result.006 file - promoters50/5664265
aaagaaattg

SEQ ID NO: 197772 - DNA, 10 bp, Unknown
  misc_feature (1)..( 10): Result.006 file - promoters50/5664265
aaagtaataa

SEQ ID NO: 197773 - DNA, 10 bp, Unknown
  misc_feature (1)..( 10): Result.006 file - promoters50/5664265
cgtgaaattg

SEQ ID NO: 197774 - DNA, 7 bp, Unknown
  misc_feature (1)..( 7): Result.006 file - promoters50/5664265
aaacagt

SEQ ID NO: 197775 - DNA, 7 bp, Unknown
  misc_feature (1)..( 7): Result.006 file - promoters50/5664265
aaaaagt

SEQ ID NO: 197776 - DNA, 7 bp, Unknown
  misc_feature (1)..( 7): Result.006 file - promoters50/5664268
taaaagt

SEQ ID NO: 197777 - DNA, 12 bp, Unknown
  misc_feature (1)..( 12): Result.006 file - promoters50/5664268
gattttagtggt

SEQ ID NO: 197778 - DNA, 12 bp, Unknown
  misc_feature (1)..( 12): Result.006 file - promoters50/5664268
aattttaataac

SEQ ID NO: 197779 - DNA, 12 bp, Unknown
  misc_feature (1)..( 12): Result.006 file - promoters50/5664268
ttttttactaac

SEQ ID NO: 197780 - DNA, 12 bp, Unknown
  misc_feature (1)..( 12): Result.006 file - promoters50/5664272
aatattactgag

SEQ ID NO: 197781 - DNA, 9 bp, Unknown
  misc_feature (1)..( 9): Result.006 file - promoters50/5664272
gttctgtgg

SEQ ID NO: 197782 - DNA, 9 bp, Unknown
  misc_feature (1)..( 9): Result.006 file - promoters50/5664272
gttttgttc

SEQ ID NO: 197783 - DNA, 9 bp, Unknown
  misc_feature (1)..( 9): Result.006 file - promoters50/5664272
ctttagttc

SEQ ID NO: 197784 - DNA, 9 bp, Unknown
  misc_feature (1)..( 9): Result.006 file - promoters50/5664272
tttgattta

SEQ ID NO: 197785 - DNA, 9 bp, Unknown
  misc_feature (1)..( 9): Result.006 file - promoters50/5664272
gatgtagct

SEQ ID NO: 197786 - DNA, 9 bp, Unknown
  misc_feature (1)..( 9): Result.006 file - promoters50/5664274
tttgattaa

SEQ ID NO: 197787 - DNA, 9 bp, Unknown
  misc_feature (1)..( 9): Result.006 file - promoters50/5664274
ttttagcaa

SEQ ID NO: 197788 - DNA, 9 bp, Unknown
  misc_feature (1)..( 9): Result.006 file - promoters50/5664274
tttgagctt

SEQ ID NO: 197789 - DNA, 9 bp, Unknown
  misc_feature (1)..( 9): Result.006 file - promoters50/5664274
aatgatctt

SEQ ID NO: 197790 - DNA, 8 bp, Unknown
  misc_feature (1)..( 8): Result.006 file - promoters50/5664274
tgttcctt

SEQ ID NO: 197791 - DNA, 8 bp, Unknown
  misc_feature (1)..( 8): Result.006 file - promoters50/5664274
agtttctt

SEQ ID NO: 197792 - DNA, 8 bp, Unknown
  misc_feature (1)..( 8): Result.006 file - promoters50/5664274
agtatctt

SEQ ID NO: 197793 - DNA, 8 bp, Unknown
  misc_feature (1)..( 8): Result.006 file - promoters50/5664274
aaacaaat

SEQ ID NO: 197794 - DNA, 8 bp, Unknown
  misc_feature (1)..( 8): Result.006 file - promoters50/5664274
aaagaaag

SEQ ID NO: 197795 - DNA, 8 bp, Unknown
  misc_feature (1)..( 8): Result.006 file - promoters50/5664294
aaaaaaat

SEQ ID NO: 197796 - DNA, 8 bp, Unknown
  misc_feature (1)..( 8): Result.006 file - promoters50/5664294
caaaccga

SEQ ID NO: 197797 - DNA, 8 bp, Unknown
  misc_feature (1)..( 8): Result.006 file - promoters50/5664294
aaaatcga

SEQ ID NO: 197798 - DNA, 8 bp, Unknown
  misc_feature (1)..( 8): Result.006 file - promoters50/5664294
aaaatctg

SEQ ID NO: 197799 - DNA, 8 bp, Unknown
  misc_feature (1)..( 8): Result.006 file - promoters50/5664294
gataaaaa

SEQ ID NO: 197800 - DNA, 8 bp, Unknown
  misc_feature (1)..( 8): Result.006 file - promoters50/5664294
tatataaa

SEQ ID NO: 197801 - DNA, 8 bp, Unknown
  misc_feature (1)..( 8): Result.006 file - promoters50/5664294
gataaatg

SEQ ID NO: 197802 - DNA, 9 bp, Unknown
  misc_feature (1)..( 9): Result.006 file - promoters50/5664294
cattaaaat

SEQ ID NO: 197803 - DNA, 9 bp, Unknown
  misc_feature (1)..( 9): Result.006 file - promoters50/5664294
ctttataat

SEQ ID NO: 197804 - DNA, 10 bp, Unknown
  misc_feature (1)..( 10): Result.006 file - promoters50/5664302
acttcataga

SEQ ID NO: 197805 - DNA, 7 bp, Unknown
  misc_feature (1)..( 7): Result.006 file - promoters50/5664302
attaaaa

SEQ ID NO: 197806 - DNA, 7 bp, Unknown
  misc_feature (1)..( 7): Result.006 file - promoters50/5664302
cttaaaa

SEQ ID NO: 197807 - DNA, 7 bp, Unknown
  misc_feature (1)..( 7): Result.006 file - promoters50/5664302
attaaaa

SEQ ID NO: 197808 - DNA, 8 bp, Unknown
  misc_feature (1)..( 8): Result.006 file - promoters50/5664302
taaaccta

SEQ ID NO: 197809 - DNA, 8 bp, Unknown
  misc_feature (1)..( 8): Result.006 file - promoters50/5664302
aaaatcta

SEQ ID NO: 197810 - DNA, 8 bp, Unknown
  misc_feature (1)..( 8): Result.006 file - promoters50/5664302
aaaatcgt

SEQ ID NO: 197811 - DNA, 10 bp, Unknown
  misc_feature (1)..( 10): Result.006 file - promoters50/5664302
aaattcaaga

SEQ ID NO: 197812 - DNA, 10 bp, Unknown
  misc_feature (1)..( 10): Result.006 file - promoters50/5664302
aaaatcataa

SEQ ID NO: 197813 - DNA, 10 bp, Unknown
  misc_feature (1)..( 10): Result.006 file - promoters50/5664302
taattataaa

SEQ ID NO: 197814 - DNA, 9 bp, Unknown
  misc_feature (1)..( 9): Result.006 file - promoters50/5664302
attcataaa

SEQ ID NO: 197815 - DNA, 9 bp, Unknown
  misc_feature (1)..( 9): Result.006 file - promoters50/5664302
aatcataaa

SEQ ID NO: 197816 - DNA, 9 bp, Unknown
  misc_feature (1)..( 9): Result.006 file - promoters50/5664302
aattataaa

SEQ ID NO: 197817 - DNA, 10 bp, Unknown
  misc_feature (1)..( 10): Result.006 file - promoters50/5664302
caataattca

SEQ ID NO: 197818 - DNA, 10 bp, Unknown
  misc_feature (1)..( 10): Result.006 file - promoters50/5664302
caaaaattca

SEQ ID NO: 197819 - DNA, 10 bp, Unknown
  misc_feature (1)..( 10): Result.006 file - promoters50/5664302
ttataattat

SEQ ID NO: 197820 - DNA, 6 bp, Unknown
  misc_feature (1)..( 6): Result.006 file - promoters50/5664302
aaaatc

SEQ ID NO: 197821 - DNA, 6 bp, Unknown
  misc_feature (1)..( 6): Result.006 file - promoters50/5664302
aaaatc

SEQ ID NO: 197822 - DNA, 6 bp, Unknown
  misc_feature (1)..( 6): Result.006 file - promoters50/5664311
aaaatc

SEQ ID NO: 197823 - DNA, 14 bp, Unknown
  misc_feature (1)..( 14): Result.006 file - promoters50/5664311
ttcattggatttct

SEQ ID NO: 197824 - DNA, 14 bp, Unknown
  misc_feature (1)..( 14): Result.006 file - promoters50/5664311
tgctttggattttg

SEQ ID NO: 197825 - DNA, 14 bp, Unknown
  misc_feature (1)..( 14): Result.006 file - promoters50/5664311
gagtttgtattcaa

SEQ ID NO: 197826 - DNA, 14 bp, Unknown
  misc_feature (1)..( 14): Result.006 file - promoters50/5664311
tgcttttgatctat

SEQ ID NO: 197827 - DNA, 14 bp, Unknown
  misc_feature (1)..( 14): Result.006 file - promoters50/5664311
actgagagatgttg

SEQ ID NO: 197828 - DNA, 14 bp, Unknown
  misc_feature (1)..( 14): Result.006 file - promoters50/5664318
ctcctctgcttgta

SEQ ID NO: 197829 - DNA, 10 bp, Unknown
  misc_feature (1)..( 10): Result.006 file - promoters50/5664318
ataagtaaac

SEQ ID NO: 197830 - DNA, 10 bp, Unknown
  misc_feature (1)..( 10): Result.006 file - promoters50/5664318
aaaagaaaat

SEQ ID NO: 197831 - DNA, 10 bp, Unknown
  misc_feature (1)..( 10): Result.006 file - promoters50/5664318
atatgtaaaa

SEQ ID NO: 197832 - DNA, 10 bp, Unknown
  misc_feature (1)..( 10): Result.006 file - promoters50/5664318
gaaaataaaa

SEQ ID NO: 197833 - DNA, 10 bp, Unknown
  misc_feature (1)..( 10): Result.006 file - promoters50/5664318
atatgtcttt

SEQ ID NO: 197834 - DNA, 10 bp, Unknown
  misc_feature (1)..( 10): Result.006 file - promoters50/5664318
atatgcaaaa

SEQ ID NO: 197835 - DNA, 10 bp, Unknown
  misc_feature (1)..( 10): Result.006 file - promoters50/5664318
ctttaaaaac

SEQ ID NO: 197836 - DNA, 10 bp, Unknown
  misc_feature (1)..( 10): Result.006 file - promoters50/5664318
atttaaatta

SEQ ID NO: 197837 - DNA, 10 bp, Unknown
  misc_feature (1)..( 10): Result.006 file - promoters50/5664318
atttaattga

SEQ ID NO: 197838 - DNA, 10 bp, Unknown
  misc_feature (1)..( 10): Result.006 file - promoters50/5664318
gtttgatttg

SEQ ID NO: 197839 - DNA, 10 bp, Unknown
  misc_feature (1)..( 10): Result.006 file - promoters50/5664318
ttatgaattg

SEQ ID NO: 197840 - DNA, 10 bp, Unknown
  misc_feature (1)..( 10): Result.006 file - promoters50/5664318
ccatgaatta

SEQ ID NO: 197841 - DNA, 12 bp, Unknown
  misc_feature (1)..( 12): Result.006 file - promoters50/5664318
tttgaattaaat

SEQ ID NO: 197842 - DNA, 12 bp, Unknown
  misc_feature (1)..( 12): Result.006 file - promoters50/5664318
caaaaataaaag

SEQ ID NO: 197843 - DNA, 12 bp, Unknown
  misc_feature (1)..( 12): Result.006 file - promoters50/5664318
gttagattagaa

SEQ ID NO: 197844 - DNA, 12 bp, Unknown
  misc_feature (1)..( 12): Result.006 file - promoters50/5664318
tttgtattatca

SEQ ID NO: 197845 - DNA, 12 bp, Unknown
  misc_feature (1)..( 12): Result.006 file - promoters50/5664318
tttgaattaaat

SEQ ID NO: 197846 - DNA, 12 bp, Unknown
  misc_feature (1)..( 12): Result.006 file - promoters50/5664318
aataagttgtgt

SEQ ID NO: 197847 - DNA, 11 bp, Unknown
  misc_feature (1)..( 11): Result.006 file - promoters50/5664318
ttaaattaatt

SEQ ID NO: 197848 - DNA, 11 bp, Unknown
  misc_feature (1)..( 11): Result.006 file - promoters50/5664318
ctaaattgcat

SEQ ID NO: 197849 - DNA, 11 bp, Unknown
  misc_feature (1)..( 11): Result.006 file - promoters50/5664318
ttagattagaa

SEQ ID NO: 197850 - DNA, 11 bp, Unknown
  misc_feature (1)..( 11): Result.006 file - promoters50/5664318
tgaaattgaaa

SEQ ID NO: 197851 - DNA, 11 bp, Unknown
  misc_feature (1)..( 11): Result.006 file - promoters50/5664318
ataagttgtgt

SEQ ID NO: 197852 - DNA, 11 bp, Unknown
  misc_feature (1)..( 11): Result.006 file - promoters50/5664318
tacagttttgt

SEQ ID NO: 197853 - DNA, 9 bp, Unknown
  misc_feature (1)..( 9): Result.006 file - promoters50/5664318
tttaattga

SEQ ID NO: 197854 - DNA, 9 bp, Unknown
  misc_feature (1)..( 9): Result.006 file - promoters50/5664318
tttgatttg

SEQ ID NO: 197855 - DNA, 9 bp, Unknown
  misc_feature (1)..( 9): Result.006 file - promoters50/5664318
tttcattga

SEQ ID NO: 197856 - DNA, 9 bp, Unknown
  misc_feature (1)..( 9): Result.006 file - promoters50/5664318
tttcattta

SEQ ID NO: 197857 - DNA, 9 bp, Unknown
  misc_feature (1)..( 9): Result.006 file - promoters50/5664318
attcttttg

SEQ ID NO: 197858 - DNA, 9 bp, Unknown
  misc_feature (1)..( 9): Result.006 file - promoters50/5664318
atgaattga

SEQ ID NO: 197859 - DNA, 9 bp, Unknown
  misc_feature (1)..( 9): Result.006 file - promoters50/5664318
atgaattag

SEQ ID NO: 197860 - DNA, 9 bp, Unknown
  misc_feature (1)..( 9): Result.006 file - promoters50/5664318
caccttttg

SEQ ID NO: 197861 - DNA, 12 bp, Unknown
  misc_feature (1)..( 12): Result.006 file - promoters50/5664318
aaaactttaaaa

SEQ ID NO: 197862 - DNA, 12 bp, Unknown
  misc_feature (1)..( 12): Result.006 file - promoters50/5664318
caaacgttatgc

SEQ ID NO: 197863 - DNA, 13 bp, Unknown
  misc_feature (1)..( 13): Result.006 file - promoters50/5664318
aaatacttacaac

SEQ ID NO: 197864 - DNA, 13 bp, Unknown
  misc_feature (1)..( 13): Result.006 file - promoters50/5664318
attaccgtgatga

SEQ ID NO: 197865 - DNA, 13 bp, Unknown
  misc_feature (1)..( 13): Result.006 file - promoters50/5664318
cgaggattgatga

SEQ ID NO: 197866 - DNA, 13 bp, Unknown
  misc_feature (1)..( 13): Result.006 file - promoters50/5664318
tcgtaatttatga

SEQ ID NO: 197867 - DNA, 14 bp, Unknown
  misc_feature (1)..( 14): Result.006 file - promoters50/5664318
atatcaaacccgaa

SEQ ID NO: 197868 - DNA, 14 bp, Unknown
  misc_feature (1)..( 14): Result.006 file - promoters50/5664318
aaatcaaaatctaa

SEQ ID NO: 197869 - DNA, 14 bp, Unknown
  misc_feature (1)..( 14): Result.006 file - promoters50/5664318
ggatcaaagttggc

SEQ ID NO: 197870 - DNA, 14 bp, Unknown
  misc_feature (1)..( 14): Result.006 file - promoters50/5664318
aaattaaaaatggg

SEQ ID NO: 197871 - DNA, 14 bp, Unknown
  misc_feature (1)..( 14): Result.006 file - promoters50/5664318
cttttaaaaaaggg

SEQ ID NO: 197872 - DNA, 14 bp, Unknown
  misc_feature (1)..( 14): Result.006 file - promoters50/5664318
ccatcaatgttgat

SEQ ID NO: 197873 - DNA, 9 bp, Unknown
  misc_feature (1)..( 9): Result.006 file - promoters50/5664318
tgtgattgc

SEQ ID NO: 197874 - DNA, 9 bp, Unknown
  misc_feature (1)..( 9): Result.006 file - promoters50/5664318
tgtgtttgt

SEQ ID NO: 197875 - DNA, 9 bp, Unknown
  misc_feature (1)..( 9): Result.006 file - promoters50/5664318
cgtgttttt

SEQ ID NO: 197876 - DNA, 9 bp, Unknown
  misc_feature (1)..( 9): Result.006 file - promoters50/5664318
tgtatttgt

SEQ ID NO: 197877 - DNA, 9 bp, Unknown
  misc_feature (1)..( 9): Result.006 file - promoters50/5664318
tttgtttgt

SEQ ID NO: 197878 - DNA, 9 bp, Unknown
  misc_feature (1)..( 9): Result.006 file - promoters50/5664329
ttttttttt

SEQ ID NO: 197879 - DNA, 10 bp, Unknown
  misc_feature (1)..( 10): Result.006 file - promoters50/5664329
ataaaataaa

SEQ ID NO: 197880 - DNA, 10 bp, Unknown
  misc_feature (1)..( 10): Result.006 file - promoters50/5664329
agcaaataat

SEQ ID NO: 197881 - DNA, 11 bp, Unknown
  misc_feature (1)..( 11): Result.006 file - promoters50/5664329
tttaagatatt

SEQ ID NO: 197882 - DNA, 11 bp, Unknown
  misc_feature (1)..( 11): Result.006 file - promoters50/5664329
tggaaaagaat

SEQ ID NO: 197883 - DNA, 11 bp, Unknown
  misc_feature (1)..( 11): Result.006 file - promoters50/5664329
tttcagaggaa

SEQ ID NO: 197884 - DNA, 11 bp, Unknown
  misc_feature (1)..( 11): Result.006 file - promoters50/5664337
agaaaaagaag

SEQ ID NO: 197885 - DNA, 9 bp, Unknown
  misc_feature (1)..( 9): Result.006 file - promoters50/5664337
gatgtgtag

SEQ ID NO: 197886 - DNA, 9 bp, Unknown
  misc_feature (1)..( 9): Result.006 file - promoters50/5664337
gatttgttt

SEQ ID NO: 197887 - DNA, 9 bp, Unknown
  misc_feature (1)..( 9): Result.006 file - promoters50/5664337
tatgtttag

SEQ ID NO: 197888 - DNA, 7 bp, Unknown
  misc_feature (1)..( 7): Result.006 file - promoters50/5664337
aaatgtc

SEQ ID NO: 197889 - DNA, 7 bp, Unknown
  misc_feature (1)..( 7): Result.006 file - promoters50/5664337
aaatgtt

SEQ ID NO: 197890 - DNA, 7 bp, Unknown
  misc_feature (1)..( 7): Result.006 file - promoters50/5664337
gaatgtc

SEQ ID NO: 197891 - DNA, 7 bp, Unknown
  misc_feature (1)..( 7): Result.006 file - promoters50/5664337
aaattcc

SEQ ID NO: 197892 - DNA, 7 bp, Unknown
  misc_feature (1)..( 7): Result.006 file - promoters50/5664337
aaaatcc

SEQ ID NO: 197893 - DNA, 7 bp, Unknown
  misc_feature (1)..( 7): Result.006 file - promoters50/5664341
caaatcc

SEQ ID NO: 197894 - DNA, 8 bp, Unknown
  misc_feature (1)..( 8): Result.006 file - promoters50/5664341
tttttcat

SEQ ID NO: 197895 - DNA, 8 bp, Unknown
  misc_feature (1)..( 8): Result.006 file - promoters50/5664341
atttccat

SEQ ID NO: 197896 - DNA, 9 bp, Unknown
  misc_feature (1)..( 9): Result.006 file - promoters50/5664341
cttcttcct

SEQ ID NO: 197897 - DNA, 8 bp, Unknown
  misc_feature (1)..( 8): Result.006 file - promoters50/5664341
cctttttc

SEQ ID NO: 197898 - DNA, 8 bp, Unknown
  misc_feature (1)..( 8): Result.006 file - promoters50/5664341
tgtttttc

SEQ ID NO: 197899 - DNA, 8 bp, Unknown
  misc_feature (1)..( 8): Result.006 file - promoters50/5664345
tgtctttg

SEQ ID NO: 197900 - DNA, 7 bp, Unknown
  misc_feature (1)..( 7): Result.006 file - promoters50/5664345
gaaaatg

SEQ ID NO: 197901 - DNA, 7 bp, Unknown
  misc_feature (1)..( 7): Result.006 file - promoters50/5664345
taaaatg

SEQ ID NO: 197902 - DNA, 7 bp, Unknown
  misc_feature (1)..( 7): Result.006 file - promoters50/5664352
taaaata

SEQ ID NO: 197903 - DNA, 12 bp, Unknown
  misc_feature (1)..( 12): Result.006 file - promoters50/5664352
tgaatctctttc

SEQ ID NO: 197904 - DNA, 12 bp, Unknown
  misc_feature (1)..( 12): Result.006 file - promoters50/5664352
tgattcttttct

SEQ ID NO: 197905 - DNA, 12 bp, Unknown
  misc_feature (1)..( 12): Result.006 file - promoters50/5664352
ataatttctttc

SEQ ID NO: 197906 - DNA, 12 bp, Unknown
  misc_feature (1)..( 12): Result.006 file - promoters50/5664352
aaaatgtctaca

SEQ ID NO: 197907 - DNA, 12 bp, Unknown
  misc_feature (1)..( 12): Result.006 file - promoters50/5664352
aaaatctgttta

SEQ ID NO: 197908 - DNA, 12 bp, Unknown
  misc_feature (1)..( 12): Result.006 file - promoters50/5664352
aaaatattttaa

SEQ ID NO: 197909 - DNA, 12 bp, Unknown
  misc_feature (1)..( 12): Result.006 file - promoters50/5664352
aatctctttctg

SEQ ID NO: 197910 - DNA, 12 bp, Unknown
  misc_feature (1)..( 12): Result.006 file - promoters50/5664352
tagctcttgctg

SEQ ID NO: 197911 - DNA, 12 bp, Unknown
  misc_feature (1)..( 12): Result.006 file - promoters50/5664352
aatttctttcaa

SEQ ID NO: 197912 - DNA, 12 bp, Unknown
  misc_feature (1)..( 12): Result.006 file - promoters50/5664352
aatctgtttacc

SEQ ID NO: 197913 - DNA, 12 bp, Unknown
  misc_feature (1)..( 12): Result.006 file - promoters50/5664352
tgtttcttactt

SEQ ID NO: 197914 - DNA, 12 bp, Unknown
  misc_feature (1)..( 12): Result.006 file - promoters50/5664352
tctttttttttg

SEQ ID NO: 197915 - DNA, 12 bp, Unknown
  misc_feature (1)..( 12): Result.006 file - promoters50/5664352
aatattttaata

SEQ ID NO: 197916 - DNA, 10 bp, Unknown
  misc_feature (1)..( 10): Result.006 file - promoters50/5664352
gtgtagaacc

SEQ ID NO: 197917 - DNA, 10 bp, Unknown
  misc_feature (1)..( 10): Result.006 file - promoters50/5664352
gcatagaaca

SEQ ID NO: 197918 - DNA, 10 bp, Unknown
  misc_feature (1)..( 10): Result.006 file - promoters50/5664352
gtggagaaca

SEQ ID NO: 197919 - DNA, 10 bp, Unknown
  misc_feature (1)..( 10): Result.006 file - promoters50/5664352
gcaaagaaag

SEQ ID NO: 197920 - DNA, 10 bp, Unknown
  misc_feature (1)..( 10): Result.006 file - promoters50/5664352
atggggaagc

SEQ ID NO: 197921 - DNA, 10 bp, Unknown
  misc_feature (1)..( 10): Result.006 file - promoters50/5664362
acatacaaca

SEQ ID NO: 197922 - DNA, 10 bp, Unknown
  misc_feature (1)..( 10): Result.006 file - promoters50/5664362
ttgttttcta

SEQ ID NO: 197923 - DNA, 10 bp, Unknown
  misc_feature (1)..( 10): Result.006 file - promoters50/5664362
gcgttttctg

SEQ ID NO: 197924 - DNA, 10 bp, Unknown
  misc_feature (1)..( 10): Result.006 file - promoters50/5664362
ttgttttaag

SEQ ID NO: 197925 - DNA, 10 bp, Unknown
  misc_feature (1)..( 10): Result.006 file - promoters50/5664362
ttgtgttctt

SEQ ID NO: 197926 - DNA, 10 bp, Unknown
  misc_feature (1)..( 10): Result.006 file - promoters50/5664362
ttgttttgaa

SEQ ID NO: 197927 - DNA, 10 bp, Unknown
  misc_feature (1)..( 10): Result.006 file - promoters50/5664362
gaatttttgt

SEQ ID NO: 197928 - DNA, 10 bp, Unknown
  misc_feature (1)..( 10): Result.006 file - promoters50/5664362
aaatatatat

SEQ ID NO: 197929 - DNA, 10 bp, Unknown
  misc_feature (1)..( 10): Result.006 file - promoters50/5664362
taatttatga

SEQ ID NO: 197930 - DNA, 10 bp, Unknown
  misc_feature (1)..( 10): Result.006 file - promoters50/5664362
aaaaatacac

SEQ ID NO: 197931 - DNA, 10 bp, Unknown
  misc_feature (1)..( 10): Result.006 file - promoters50/5664362
gaaagtattc

SEQ ID NO: 197932 - DNA, 10 bp, Unknown
  misc_feature (1)..( 10): Result.006 file - promoters50/5664362
aaaaacaaat

SEQ ID NO: 197933 - DNA, 10 bp, Unknown
  misc_feature (1)..( 10): Result.006 file - promoters50/5664362
caatttttga

SEQ ID NO: 197934 - DNA, 10 bp, Unknown
  misc_feature (1)..( 10): Result.006 file - promoters50/5664362
attcttttga

SEQ ID NO: 197935 - DNA, 10 bp, Unknown
  misc_feature (1)..( 10): Result.006 file - promoters50/5664362
ttaaagatat

SEQ ID NO: 197936 - DNA, 10 bp, Unknown
  misc_feature (1)..( 10): Result.006 file - promoters50/5664362
agaaaaataa

SEQ ID NO: 197937 - DNA, 10 bp, Unknown
  misc_feature (1)..( 10): Result.006 file - promoters50/5664362
accaaaataa

SEQ ID NO: 197938 - DNA, 10 bp, Unknown
  misc_feature (1)..( 10): Result.006 file - promoters50/5664362
agaaaaaaaa

SEQ ID NO: 197939 - DNA, 10 bp, Unknown
  misc_feature (1)..( 10): Result.006 file - promoters50/5664362
cacaatatac

SEQ ID NO: 197940 - DNA, 10 bp, Unknown
  misc_feature (1)..( 10): Result.006 file - promoters50/5664369
ggcaaaatcg

SEQ ID NO: 197941 - DNA, 10 bp, Unknown
  misc_feature (1)..( 10): Result.006 file - promoters50/5664369
aatattatta

SEQ ID NO: 197942 - DNA, 10 bp, Unknown
  misc_feature (1)..( 10): Result.006 file - promoters50/5664369
acagttatta

SEQ ID NO: 197943 - DNA, 10 bp, Unknown
  misc_feature (1)..( 10): Result.006 file - promoters50/5664369
aatataattt

SEQ ID NO: 197944 - DNA, 11 bp, Unknown
  misc_feature (1)..( 11): Result.006 file - promoters50/5664369
caaaaaaattg

SEQ ID NO: 197945 - DNA, 11 bp, Unknown
  misc_feature (1)..( 11): Result.006 file - promoters50/5664369
taaaaaacttg

SEQ ID NO: 197946 - DNA, 11 bp, Unknown
  misc_feature (1)..( 11): Result.006 file - promoters50/5664369
caagaaacact

SEQ ID NO: 197947 - DNA, 6 bp, Unknown
  misc_feature (1)..( 6): Result.006 file - promoters50/5664369
aatttt

SEQ ID NO: 197948 - DNA, 6 bp, Unknown
  misc_feature (1)..( 6): Result.006 file - promoters50/5664369
aatttt

SEQ ID NO: 197949 - DNA, 7 bp, Unknown
  misc_feature (1)..( 7): Result.006 file - promoters50/5664369
aatattt

SEQ ID NO: 197950 - DNA, 7 bp, Unknown
  misc_feature (1)..( 7): Result.006 file - promoters50/5664369
tatgaac

SEQ ID NO: 197951 - DNA, 7 bp, Unknown
  misc_feature (1)..( 7): Result.006 file - promoters50/5664369
tatgaaa

SEQ ID NO: 197952 - DNA, 7 bp, Unknown
  misc_feature (1)..( 7): Result.006 file - promoters50/5664390
tattaaa

SEQ ID NO: 197953 - DNA, 7 bp, Unknown
  misc_feature (1)..( 7): Result.006 file - promoters50/5664390
aattaca

SEQ ID NO: 197954 - DNA, 7 bp, Unknown
  misc_feature (1)..( 7): Result.006 file - promoters50/5664390
aattact

SEQ ID NO: 197955 - DNA, 6 bp, Unknown
  misc_feature (1)..( 6): Result.006 file - promoters50/5664390
attaca

SEQ ID NO: 197956 - DNA, 9 bp, Unknown
  misc_feature (1)..( 9): Result.006 file - promoters50/5664390
ttattttgc

SEQ ID NO: 197957 - DNA, 9 bp, Unknown
  misc_feature (1)..( 9): Result.006 file - promoters50/5664390
ttatttact

SEQ ID NO: 197958 - DNA, 9 bp, Unknown
  misc_feature (1)..( 9): Result.006 file - promoters50/5664390
ttaattact

SEQ ID NO: 197959 - DNA, 13 bp, Unknown
  misc_feature (1)..( 13): Result.006 file - promoters50/5664390
actttatacacga

SEQ ID NO: 197960 - DNA, 13 bp, Unknown
  misc_feature (1)..( 13): Result.006 file - promoters50/5664390
acttaataacagt

SEQ ID NO: 197961 - DNA, 13 bp, Unknown
  misc_feature (1)..( 13): Result.006 file - promoters50/5664402
gattaattactaa

SEQ ID NO: 197962 - DNA, 12 bp, Unknown
  misc_feature (1)..( 12): Result.006 file - promoters50/5664402
aaaattaaattt

SEQ ID NO: 197963 - DNA, 12 bp, Unknown
  misc_feature (1)..( 12): Result.006 file - promoters50/5664402
aaaattgaattt

SEQ ID NO: 197964 - DNA, 12 bp, Unknown
  misc_feature (1)..( 12): Result.006 file - promoters50/5664402
ttaatgaaaatc

SEQ ID NO: 197965 - DNA, 12 bp, Unknown
  misc_feature (1)..( 12): Result.006 file - promoters50/5664402
taccttagtgac

SEQ ID NO: 197966 - DNA, 10 bp, Unknown
  misc_feature (1)..( 10): Result.006 file - promoters50/5664402
taaattaaaa

SEQ ID NO: 197967 - DNA, 10 bp, Unknown
  misc_feature (1)..( 10): Result.006 file - promoters50/5664402
ttaatgaaaa

SEQ ID NO: 197968 - DNA, 10 bp, Unknown
  misc_feature (1)..( 10): Result.006 file - promoters50/5664402
ggtgtgaaaa

SEQ ID NO: 197969 - DNA, 10 bp, Unknown
  misc_feature (1)..( 10): Result.006 file - promoters50/5664435
ttagtgactc

SEQ ID NO: 197970 - DNA, 8 bp, Unknown
  misc_feature (1)..( 8): Result.006 file - promoters50/5664435
tttagtta

SEQ ID NO: 197971 - DNA, 8 bp, Unknown
  misc_feature (1)..( 8): Result.006 file - promoters50/5664435
tttagtag

SEQ ID NO: 197972 - DNA, 8 bp, Unknown
  misc_feature (1)..( 8): Result.006 file - promoters50/5664435
cttaatta

SEQ ID NO: 197973 - DNA, 8 bp, Unknown
  misc_feature (1)..( 8): Result.006 file - promoters50/5664435
attaattt

SEQ ID NO: 197974 - DNA, 12 bp, Unknown
  misc_feature (1)..( 12): Result.006 file - promoters50/5664435
acaattttagtg

SEQ ID NO: 197975 - DNA, 12 bp, Unknown
  misc_feature (1)..( 12): Result.006 file - promoters50/5664435
acaagtttacag

SEQ ID NO: 197976 - DNA, 12 bp, Unknown
  misc_feature (1)..( 12): Result.006 file - promoters50/5664435
atccttttagtg

SEQ ID NO: 197977 - DNA, 12 bp, Unknown
  misc_feature (1)..( 12): Result.006 file - promoters50/5664435
acaattactgtt

SEQ ID NO: 197978 - DNA, 9 bp, Unknown
  misc_feature (1)..( 9): Result.006 file - promoters50/5664435
aattttggt

SEQ ID NO: 197979 - DNA, 9 bp, Unknown
  misc_feature (1)..( 9): Result.006 file - promoters50/5664435
gattctggt

SEQ ID NO: 197980 - DNA, 9 bp, Unknown
  misc_feature (1)..( 9): Result.006 file - promoters50/5664435
aatttttag

SEQ ID NO: 197981 - DNA, 9 bp, Unknown
  misc_feature (1)..( 9): Result.006 file - promoters50/5664435
tattttttc

SEQ ID NO: 197982 - DNA, 12 bp, Unknown
  misc_feature (1)..( 12): Result.006 file - promoters50/5664435
tattaagaaata

SEQ ID NO: 197983 - DNA, 12 bp, Unknown
  misc_feature (1)..( 12): Result.006 file - promoters50/5664435
tataaagagact

SEQ ID NO: 197984 - DNA, 12 bp, Unknown
  misc_feature (1)..( 12): Result.006 file - promoters50/5664435
caaaaagaccaa

SEQ ID NO: 197985 - DNA, 12 bp, Unknown
  misc_feature (1)..( 12): Result.006 file - promoters50/5664435
tgtcaagaacaa

SEQ ID NO: 197986 - DNA, 11 bp, Unknown
  misc_feature (1)..( 11): Result.006 file - promoters50/5664435
gtaaattttta

SEQ ID NO: 197987 - DNA, 11 bp, Unknown
  misc_feature (1)..( 11): Result.006 file - promoters50/5664435
gtatattaggc

SEQ ID NO: 197988 - DNA, 11 bp, Unknown
  misc_feature (1)..( 11): Result.006 file - promoters50/5664435
gtaaatttatt

SEQ ID NO: 197989 - DNA, 11 bp, Unknown
  misc_feature (1)..( 11): Result.006 file - promoters50/5664438
caaaatctatt

SEQ ID NO: 197990 - DNA, 8 bp, Unknown
  misc_feature (1)..( 8): Result.006 file - promoters50/5664438
ttataata

SEQ ID NO: 197991 - DNA, 8 bp, Unknown
  misc_feature (1)..( 8): Result.006 file - promoters50/5664438
ttagaatg

SEQ ID NO: 197992 - DNA, 8 bp, Unknown
  misc_feature (1)..( 8): Result.006 file - promoters50/5664438
ctataata

SEQ ID NO: 197993 - DNA, 8 bp, Unknown
  misc_feature (1)..( 8): Result.006 file - promoters50/5664438
aattcttt

SEQ ID NO: 197994 - DNA, 8 bp, Unknown
  misc_feature (1)..( 8): Result.006 file - promoters50/5664438
aattcttc

SEQ ID NO: 197995 - DNA, 8 bp, Unknown
  misc_feature (1)..( 8): Result.006 file - promoters50/5664438
aatttttt

SEQ ID NO: 197996 - DNA, 11 bp, Unknown
  misc_feature (1)..( 11): Result.006 file - promoters50/5664438
taataaataaa

SEQ ID NO: 197997 - DNA, 11 bp, Unknown
  misc_feature (1)..( 11): Result.006 file - promoters50/5664438
taacaaatatc

SEQ ID NO: 197998 - DNA, 11 bp, Unknown
  misc_feature (1)..( 11): Result.006 file - promoters50/5664457
actaaaatatc

SEQ ID NO: 197999 - DNA, 8 bp, Unknown
  misc_feature (1)..( 8): Result.006 file - promoters50/5664457
acaataaa

SEQ ID NO: 198000 - DNA, 8 bp, Unknown
  misc_feature (1)..( 8): Result.006 file - promoters50/5664457
ataataaa

SEQ ID NO: 198001 - DNA, 8 bp, Unknown
  misc_feature (1)..( 8): Result.006 file - promoters50/5664472
acagtaag

SEQ ID NO: 198002 - DNA, 9 bp, Unknown
  misc_feature (1)..( 9): Result.006 file - promoters50/5664472
tattttttt

SEQ ID NO: 198003 - DNA, 9 bp, Unknown
  misc_feature (1)..( 9): Result.006 file - promoters50/5664472
tattcttta

SEQ ID NO: 198004 - DNA, 10 bp, Unknown
  misc_feature (1)..( 10): Result.006 file - promoters50/5664472
cttttgtttt

SEQ ID NO: 198005 - DNA, 10 bp, Unknown
  misc_feature (1)..( 10): Result.006 file - promoters50/5664472
tttttatttt

SEQ ID NO: 198006 - DNA, 11 bp, Unknown
  misc_feature (1)..( 11): Result.006 file - promoters50/5664472
attttgctcga

SEQ ID NO: 198007 - DNA, 11 bp, Unknown
  misc_feature (1)..( 11): Result.006 file - promoters50/5664472
attttgaaaat

SEQ ID NO: 198008 - DNA, 11 bp, Unknown
  misc_feature (1)..( 11): Result.006 file - promoters50/5664472
ctttagctgtc

SEQ ID NO: 198009 - DNA, 11 bp, Unknown
  misc_feature (1)..( 11): Result.006 file - promoters50/5664480
cttttgttttt

SEQ ID NO: 198010 - DNA, 11 bp, Unknown
  misc_feature (1)..( 11): Result.006 file - promoters50/5664480
gtttatgtgga

SEQ ID NO: 198011 - DNA, 11 bp, Unknown
  misc_feature (1)..( 11): Result.006 file - promoters50/5664480
tattatttgga

SEQ ID NO: 198012 - DNA, 12 bp, Unknown
  misc_feature (1)..( 12): Result.006 file - promoters50/5664480
tgttgatgtaaa

SEQ ID NO: 198013 - DNA, 12 bp, Unknown
  misc_feature (1)..( 12): Result.006 file - promoters50/5664480
tttgtattttat

SEQ ID NO: 198014 - DNA, 12 bp, Unknown
  misc_feature (1)..( 12): Result.006 file - promoters50/5664480
ggttaatgttca

SEQ ID NO: 198015 - DNA, 13 bp, Unknown
  misc_feature (1)..( 13): Result.006 file - promoters50/5664480
attacatgaacag

SEQ ID NO: 198016 - DNA, 13 bp, Unknown
  misc_feature (1)..( 13): Result.006 file - promoters50/5664480
gttaaatgaagat

SEQ ID NO: 198017 - DNA, 13 bp, Unknown
  misc_feature (1)..( 13): Result.006 file - promoters50/5664480
taataatgatgat

SEQ ID NO: 198018 - DNA, 13 bp, Unknown
  misc_feature (1)..( 13): Result.006 file - promoters50/5664480
gttaaaatgttga

SEQ ID NO: 198019 - DNA, 9 bp, Unknown
  misc_feature (1)..( 9): Result.006 file - promoters50/5664480
gtttataaa

SEQ ID NO: 198020 - DNA, 9 bp, Unknown
  misc_feature (1)..( 9): Result.006 file - promoters50/5664480
gtctataaa

SEQ ID NO: 198021 - DNA, 9 bp, Unknown
  misc_feature (1)..( 9): Result.006 file - promoters50/5664480
tcttataaa

SEQ ID NO: 198022 - DNA, 9 bp, Unknown
  misc_feature (1)..( 9): Result.006 file - promoters50/5664488
tcttttaag

SEQ ID NO: 198023 - DNA, 14 bp, Unknown
  misc_feature (1)..( 14): Result.006 file - promoters50/5664488
ataagtatatgagg

SEQ ID NO: 198024 - DNA, 14 bp, Unknown
  misc_feature (1)..( 14): Result.006 file - promoters50/5664488
tttcttgtatgagt

SEQ ID NO: 198025 - DNA, 14 bp, Unknown
  misc_feature (1)..( 14): Result.006 file - promoters50/5664488
ataagtgtatgagg

SEQ ID NO: 198026 - DNA, 14 bp, Unknown
  misc_feature (1)..( 14): Result.006 file - promoters50/5664488
tttactatttgaca

SEQ ID NO: 198027 - DNA, 14 bp, Unknown
  misc_feature (1)..( 14): Result.006 file - promoters50/5664505
accaaaatttgaaa

SEQ ID NO: 198028 - DNA, 8 bp, Unknown
  misc_feature (1)..( 8): Result.006 file - promoters50/5664505
attatctg

SEQ ID NO: 198029 - DNA, 8 bp, Unknown
  misc_feature (1)..( 8): Result.006 file - promoters50/5664505
attatccg

SEQ ID NO: 198030 - DNA, 8 bp, Unknown
  misc_feature (1)..( 8): Result.006 file - promoters50/5664535
attaaccg

SEQ ID NO: 198031 - DNA, 13 bp, Unknown
  misc_feature (1)..( 13): Result.006 file - promoters50/5664535
aattatcaataat

SEQ ID NO: 198032 - DNA, 13 bp, Unknown
  misc_feature (1)..( 13): Result.006 file - promoters50/5664535
aaaattgaataat

SEQ ID NO: 198033 - DNA, 13 bp, Unknown
  misc_feature (1)..( 13): Result.006 file - promoters50/5664535
aaaagtgattaaa

SEQ ID NO: 198034 - DNA, 9 bp, Unknown
  misc_feature (1)..( 9): Result.006 file - promoters50/5664535
taataacta

SEQ ID NO: 198035 - DNA, 9 bp, Unknown
  misc_feature (1)..( 9): Result.006 file - promoters50/5664535
taaaaacta

SEQ ID NO: 198036 - DNA, 9 bp, Unknown
  misc_feature (1)..( 9): Result.006 file - promoters50/5664535
taaacactc

SEQ ID NO: 198037 - DNA, 8 bp, Unknown
  misc_feature (1)..( 8): Result.006 file - promoters50/5664535
aataaaga

SEQ ID NO: 198038 - DNA, 8 bp, Unknown
  misc_feature (1)..( 8): Result.006 file - promoters50/5664535
aataaacc

SEQ ID NO: 198039 - DNA, 8 bp, Unknown
  misc_feature (1)..( 8): Result.006 file - promoters50/5664535
cataaacc

SEQ ID NO: 198040 - DNA, 9 bp, Unknown
  misc_feature (1)..( 9): Result.006 file - promoters50/5664535
tatttaaac

SEQ ID NO: 198041 - DNA, 9 bp, Unknown
  misc_feature (1)..( 9): Result.006 file - promoters50/5664535
ggtttaaac

SEQ ID NO: 198042 - DNA, 9 bp, Unknown
  misc_feature (1)..( 9): Result.006 file - promoters50/5664535
ggtctaatc

SEQ ID NO: 198043 - DNA, 8 bp, Unknown
  misc_feature (1)..( 8): Result.006 file - promoters50/5664535
tataaacc

SEQ ID NO: 198044 - DNA, 8 bp, Unknown
  misc_feature (1)..( 8): Result.006 file - promoters50/5664535
tataaata

SEQ ID NO: 198045 - DNA, 8 bp, Unknown
  misc_feature (1)..( 8): Result.006 file - promoters50/5664633
tataaata

SEQ ID NO: 198046 - DNA, 7 bp, Unknown
  misc_feature (1)..( 7): Result.006 file - promoters50/5664633
tatttta

SEQ ID NO: 198047 - DNA, 7 bp, Unknown
  misc_feature (1)..( 7): Result.006 file - promoters50/5664633
catttta

SEQ ID NO: 198048 - DNA, 7 bp, Unknown
  misc_feature (1)..( 7): Result.006 file - promoters50/5664633
tattttc

SEQ ID NO: 198049 - DNA, 9 bp, Unknown
  misc_feature (1)..( 9): Result.006 file - promoters50/5664633
tattttatc

SEQ ID NO: 198050 - DNA, 9 bp, Unknown
  misc_feature (1)..( 9): Result.006 file - promoters50/5664633
tattttttt

SEQ ID NO: 198051 - DNA, 10 bp, Unknown
  misc_feature (1)..( 10): Result.006 file - promoters50/5664633
tatgttttta

SEQ ID NO: 198052 - DNA, 14 bp, Unknown
  misc_feature (1)..( 14): Result.006 file - promoters50/5664633
tccgatttcatttt

SEQ ID NO: 198053 - DNA, 14 bp, Unknown
  misc_feature (1)..( 14): Result.006 file - promoters50/5664633
atttttttccttta

SEQ ID NO: 198054 - DNA, 14 bp, Unknown
  misc_feature (1)..( 14): Result.006 file - promoters50/5664633
tccgatttcttttt

SEQ ID NO: 198055 - DNA, 14 bp, Unknown
  misc_feature (1)..( 14): Result.006 file - promoters50/5664633
tatgatttcttaaa

SEQ ID NO: 198056 - DNA, 8 bp, Unknown
  misc_feature (1)..( 8): Result.006 file - promoters50/5664633
aaaattaa

SEQ ID NO: 198057 - DNA, 8 bp, Unknown
  misc_feature (1)..( 8): Result.006 file - promoters50/5664633
aaaattaa

SEQ ID NO: 198058 - DNA, 8 bp, Unknown
  misc_feature (1)..( 8): Result.006 file - promoters50/5664633
caaactaa

SEQ ID NO: 198059 - DNA, 7 bp, Unknown
  misc_feature (1)..( 7): Result.006 file - promoters50/5664633
ttgaata

SEQ ID NO: 198060 - DNA, 7 bp, Unknown
  misc_feature (1)..( 7): Result.006 file - promoters50/5664633
ttgaatt

SEQ ID NO: 198061 - DNA, 6 bp, Unknown
  misc_feature (1)..( 6): Result.006 file - promoters50/5664633
tgaatt

SEQ ID NO: 198062 - DNA, 10 bp, Unknown
  misc_feature (1)..( 10): Result.006 file - promoters50/5664633
aaaaaaatta

SEQ ID NO: 198063 - DNA, 10 bp, Unknown
  misc_feature (1)..( 10): Result.006 file - promoters50/5664633
atgaaaatta

SEQ ID NO: 198064 - DNA, 10 bp, Unknown
  misc_feature (1)..( 10): Result.006 file - promoters50/5664633
aaataaattg

SEQ ID NO: 198065 - DNA, 9 bp, Unknown
  misc_feature (1)..( 9): Result.006 file - promoters50/5664633
cgatttcat

SEQ ID NO: 198066 - DNA, 9 bp, Unknown
  misc_feature (1)..( 9): Result.006 file - promoters50/5664633
tgatttctt

SEQ ID NO: 198067 - DNA, 9 bp, Unknown
  misc_feature (1)..( 9): Result.006 file - promoters50/5664633
tgatttttt

SEQ ID NO: 198068 - DNA, 9 bp, Unknown
  misc_feature (1)..( 9): Result.006 file - promoters50/5664657
cgatttctt

SEQ ID NO: 198069 - DNA, 10 bp, Unknown
  misc_feature (1)..( 10): Result.006 file - promoters50/5664657
tgctaaaaga

SEQ ID NO: 198070 - DNA, 10 bp, Unknown
  misc_feature (1)..( 10): Result.006 file - promoters50/5664657
taaaaaaaga

SEQ ID NO: 198071 - DNA, 10 bp, Unknown
  misc_feature (1)..( 10): Result.006 file - promoters50/5664657
taataaaagt

SEQ ID NO: 198072 - DNA, 10 bp, Unknown
  misc_feature (1)..( 10): Result.006 file - promoters50/5664657
aattaaatat

SEQ ID NO: 198073 - DNA, 12 bp, Unknown
  misc_feature (1)..( 12): Result.006 file - promoters50/5664657
tggggtttgaag

SEQ ID NO: 198074 - DNA, 12 bp, Unknown
  misc_feature (1)..( 12): Result.006 file - promoters50/5664657
atttgtttgaaa

SEQ ID NO: 198075 - DNA, 12 bp, Unknown
  misc_feature (1)..( 12): Result.006 file - promoters50/5664657
atttttttgttt

SEQ ID NO: 198076 - DNA, 12 bp, Unknown
  misc_feature (1)..( 12): Result.006 file - promoters50/5664657
cgagttttagtt

SEQ ID NO: 198077 - DNA, 8 bp, Unknown
  misc_feature (1)..( 8): Result.006 file - promoters50/5664657
cttgaaaa

SEQ ID NO: 198078 - DNA, 8 bp, Unknown
  misc_feature (1)..( 8): Result.006 file - promoters50/5664657
ctttaaaa

SEQ ID NO: 198079 - DNA, 8 bp, Unknown
  misc_feature (1)..( 8): Result.006 file - promoters50/5664657
atttaaat

SEQ ID NO: 198080 - DNA, 8 bp, Unknown
  misc_feature (1)..( 8): Result.006 file - promoters50/5664703
ttttaaaa

SEQ ID NO: 198081 - DNA, 9 bp, Unknown
  misc_feature (1)..( 9): Result.006 file - promoters50/5664703
attgtatct

SEQ ID NO: 198082 - DNA, 9 bp, Unknown
  misc_feature (1)..( 9): Result.006 file - promoters50/5664703
tttgtatat

SEQ ID NO: 198083 - DNA, 9 bp, Unknown
  misc_feature (1)..( 9): Result.006 file - promoters50/5664703
tttgtttat

SEQ ID NO: 198084 - DNA, 8 bp, Unknown
  misc_feature (1)..( 8): Result.006 file - promoters50/5664703
tctgaatt

SEQ ID NO: 198085 - DNA, 8 bp, Unknown
  misc_feature (1)..( 8): Result.006 file - promoters50/5664703
tctgaaca

SEQ ID NO: 198086 - DNA, 8 bp, Unknown
  misc_feature (1)..( 8): Result.006 file - promoters50/5664703
gctggatt

SEQ ID NO: 198087 - DNA, 12 bp, Unknown
  misc_feature (1)..( 12): Result.006 file - promoters50/5664703
cttattgtataa

SEQ ID NO: 198088 - DNA, 12 bp, Unknown
  misc_feature (1)..( 12): Result.006 file - promoters50/5664703
ctttttgtttat

SEQ ID NO: 198089 - DNA, 12 bp, Unknown
  misc_feature (1)..( 12): Result.006 file - promoters50/5664721
tgatttgtatat

SEQ ID NO: 198090 - DNA, 11 bp, Unknown
  misc_feature (1)..( 11): Result.006 file - promoters50/5664721
taataataata

SEQ ID NO: 198091 - DNA, 11 bp, Unknown
  misc_feature (1)..( 11): Result.006 file - promoters50/5664721
ctctaataagt

SEQ ID NO: 198092 - DNA, 11 bp, Unknown
  misc_feature (1)..( 11): Result.006 file - promoters50/5664721
aaattataatg

SEQ ID NO: 198093 - DNA, 11 bp, Unknown
  misc_feature (1)..( 11): Result.006 file - promoters50/5664721
aaattaatatt

SEQ ID NO: 198094 - DNA, 11 bp, Unknown
  misc_feature (1)..( 11): Result.006 file - promoters50/5664749
cgctaaaaagt

SEQ ID NO: 198095 - DNA, 9 bp, Unknown
  misc_feature (1)..( 9): Result.006 file - promoters50/5664749
attgcttat

SEQ ID NO: 198096 - DNA, 9 bp, Unknown
  misc_feature (1)..( 9): Result.006 file - promoters50/5664749
attacttac

SEQ ID NO: 198097 - DNA, 9 bp, Unknown
  misc_feature (1)..( 9): Result.006 file - promoters50/5664749
cacacttac

SEQ ID NO: 198098 - DNA, 11 bp, Unknown
  misc_feature (1)..( 11): Result.006 file - promoters50/5664749
aaaactaaatc

SEQ ID NO: 198099 - DNA, 11 bp, Unknown
  misc_feature (1)..( 11): Result.006 file - promoters50/5664749
tttactcaatc

SEQ ID NO: 198100 - DNA, 11 bp, Unknown
  misc_feature (1)..( 11): Result.006 file - promoters50/5664749
tttactcacca

SEQ ID NO: 198101 - DNA, 7 bp, Unknown
  misc_feature (1)..( 7): Result.006 file - promoters50/5664749
attgtct

SEQ ID NO: 198102 - DNA, 7 bp, Unknown
  misc_feature (1)..( 7): Result.006 file - promoters50/5664749
attctct

SEQ ID NO: 198103 - DNA, 7 bp, Unknown
  misc_feature (1)..( 7): Result.006 file - promoters50/5664787
tttctct

SEQ ID NO: 198104 - DNA, 11 bp, Unknown
  misc_feature (1)..( 11): Result.006 file - promoters50/5664787
ctaaaaagtaa

SEQ ID NO: 198105 - DNA, 11 bp, Unknown
  misc_feature (1)..( 11): Result.006 file - promoters50/5664787
atataaattaa

SEQ ID NO: 198106 - DNA, 11 bp, Unknown
  misc_feature (1)..( 11): Result.006 file - promoters50/5664787
atatatattct

SEQ ID NO: 198107 - DNA, 13 bp, Unknown
  misc_feature (1)..( 13): Result.006 file - promoters50/5664787
taatgaaaacaac

SEQ ID NO: 198108 - DNA, 13 bp, Unknown
  misc_feature (1)..( 13): Result.006 file - promoters50/5664787
aaattaaaatggt

SEQ ID NO: 198109 - DNA, 13 bp, Unknown
  misc_feature (1)..( 13): Result.006 file - promoters50/5664806
aaactaaaaaggt

SEQ ID NO: 198110 - DNA, 10 bp, Unknown
  misc_feature (1)..( 10): Result.006 file - promoters50/5664806
aaagaaagga

SEQ ID NO: 198111 - DNA, 10 bp, Unknown
  misc_feature (1)..( 10): Result.006 file - promoters50/5664806
gcagaaagca

SEQ ID NO: 198112 - DNA, 10 bp, Unknown
  misc_feature (1)..( 10): Result.006 file - promoters50/5664806
aaaggaagga

SEQ ID NO: 198113 - DNA, 11 bp, Unknown
  misc_feature (1)..( 11): Result.006 file - promoters50/5664806
atctggaaaac

SEQ ID NO: 198114 - DNA, 11 bp, Unknown
  misc_feature (1)..( 11): Result.006 file - promoters50/5664806
accaagaaaac

SEQ ID NO: 198115 - DNA, 11 bp, Unknown
  misc_feature (1)..( 11): Result.006 file - promoters50/5664806
accaataaaag

SEQ ID NO: 198116 - DNA, 11 bp, Unknown
  misc_feature (1)..( 11): Result.006 file - promoters50/5664806
tcttatttttt

SEQ ID NO: 198117 - DNA, 11 bp, Unknown
  misc_feature (1)..( 11): Result.006 file - promoters50/5664806
tcttctttttt

SEQ ID NO: 198118 - DNA, 11 bp, Unknown
  misc_feature (1)..( 11): Result.006 file - promoters50/5664806
ccatattttct

SEQ ID NO: 198119 - DNA, 10 bp, Unknown
  misc_feature (1)..( 10): Result.006 file - promoters50/5664806
atgaatgaac

SEQ ID NO: 198120 - DNA, 10 bp, Unknown
  misc_feature (1)..( 10): Result.006 file - promoters50/5664806
tataattaac

SEQ ID NO: 198121 - DNA, 10 bp, Unknown
  misc_feature (1)..( 10): Result.006 file - promoters50/5664806
tataaataat

SEQ ID NO: 198122 - DNA, 8 bp, Unknown
  misc_feature (1)..( 8): Result.006 file - promoters50/5664806
tcatgaaa

SEQ ID NO: 198123 - DNA, 8 bp, Unknown
  misc_feature (1)..( 8): Result.006 file - promoters50/5664806
ttatgaaa

SEQ ID NO: 198124 - DNA, 8 bp, Unknown
  misc_feature (1)..( 8): Result.006 file - promoters50/5664814
tcataaaa

SEQ ID NO: 198125 - DNA, 7 bp, Unknown
  misc_feature (1)..( 7): Result.006 file - promoters50/5664814
aaaaaat

SEQ ID NO: 198126 - DNA, 7 bp, Unknown
  misc_feature (1)..( 7): Result.006 file - promoters50/5664814
aaaaaaa

SEQ ID NO: 198127 - DNA, 8 bp, Unknown
  misc_feature (1)..( 8): Result.006 file - promoters50/5664814
aaataaaa

SEQ ID NO: 198128 - DNA, 8 bp, Unknown
  misc_feature (1)..( 8): Result.006 file - promoters50/5664814
taataaat

SEQ ID NO: 198129 - DNA, 8 bp, Unknown
  misc_feature (1)..( 8): Result.006 file - promoters50/5664814
aattaaat

SEQ ID NO: 198130 - DNA, 8 bp, Unknown
  misc_feature (1)..( 8): Result.006 file - promoters50/5664814
gattaaat

SEQ ID NO: 198131 - DNA, 12 bp, Unknown
  misc_feature (1)..( 12): Result.006 file - promoters50/5664814
attattttcttg

SEQ ID NO: 198132 - DNA, 12 bp, Unknown
  misc_feature (1)..( 12): Result.006 file - promoters50/5664814
tttatttttcat

SEQ ID NO: 198133 - DNA, 12 bp, Unknown
  misc_feature (1)..( 12): Result.006 file - promoters50/5664814
gggattttctta

SEQ ID NO: 198134 - DNA, 12 bp, Unknown
  misc_feature (1)..( 12): Result.006 file - promoters50/5664814
aatattttagtt

SEQ ID NO: 198135 - DNA, 12 bp, Unknown
  misc_feature (1)..( 12): Result.006 file - promoters50/5664814
tttattttattt

SEQ ID NO: 198136 - DNA, 12 bp, Unknown
  misc_feature (1)..( 12): Result.006 file - promoters50/5664814
attattattaga

SEQ ID NO: 198137 - DNA, 12 bp, Unknown
  misc_feature (1)..( 12): Result.006 file - promoters50/5664865
acaattttgttg

SEQ ID NO: 198138 - DNA, 8 bp, Unknown
  misc_feature (1)..( 8): Result.006 file - promoters50/5664865
ggattaaa

SEQ ID NO: 198139 - DNA, 8 bp, Unknown
  misc_feature (1)..( 8): Result.006 file - promoters50/5664865
ggattaat

SEQ ID NO: 198140 - DNA, 8 bp, Unknown
  misc_feature (1)..( 8): Result.006 file - promoters50/5664869
ttattaaa

SEQ ID NO: 198141 - DNA, 7 bp, Unknown
  misc_feature (1)..( 7): Result.006 file - promoters50/5664869
aatattt

SEQ ID NO: 198142 - DNA, 7 bp, Unknown
  misc_feature (1)..( 7): Result.006 file - promoters50/5664869
aatatta

SEQ ID NO: 198143 - DNA, 7 bp, Unknown
  misc_feature (1)..( 7): Result.006 file - promoters50/5664869
aattttt

SEQ ID NO: 198144 - DNA, 8 bp, Unknown
  misc_feature (1)..( 8): Result.006 file - promoters50/5664869
aacagaaa

SEQ ID NO: 198145 - DNA, 8 bp, Unknown
  misc_feature (1)..( 8): Result.006 file - promoters50/5664869
gacagaaa

SEQ ID NO: 198146 - DNA, 8 bp, Unknown
  misc_feature (1)..( 8): Result.006 file - promoters50/5664873
aacagaga

SEQ ID NO: 198147 - DNA, 13 bp, Unknown
  misc_feature (1)..( 13): Result.006 file - promoters50/5664873
gcaaagaaagaca

SEQ ID NO: 198148 - DNA, 13 bp, Unknown
  misc_feature (1)..( 13): Result.006 file - promoters50/5664873
caaaataaaataa

SEQ ID NO: 198149 - DNA, 13 bp, Unknown
  misc_feature (1)..( 13): Result.006 file - promoters50/5664873
cgaaataaatgac

SEQ ID NO: 198150 - DNA, 13 bp, Unknown
  misc_feature (1)..( 13): Result.006 file - promoters50/5664873
aaaaataaactaa

SEQ ID NO: 198151 - DNA, 13 bp, Unknown
  misc_feature (1)..( 13): Result.006 file - promoters50/5664873
aaaaatcgtaaaa

SEQ ID NO: 198152 - DNA, 13 bp, Unknown
  misc_feature (1)..( 13): Result.006 file - promoters50/5664873
ataaccaaaaata

SEQ ID NO: 198153 - DNA, 12 bp, Unknown
  misc_feature (1)..( 12): Result.006 file - promoters50/5664873
tcctataaatat

SEQ ID NO: 198154 - DNA, 12 bp, Unknown
  misc_feature (1)..( 12): Result.006 file - promoters50/5664873
ttctatatatat

SEQ ID NO: 198155 - DNA, 12 bp, Unknown
  misc_feature (1)..( 12): Result.006 file - promoters50/5664873
tcctataataaa

SEQ ID NO: 198156 - DNA, 12 bp, Unknown
  misc_feature (1)..( 12): Result.006 file - promoters50/5664873
tcctatatatca

SEQ ID NO: 198157 - DNA, 12 bp, Unknown
  misc_feature (1)..( 12): Result.006 file - promoters50/5664873
tcttatatattc

SEQ ID NO: 198158 - DNA, 12 bp, Unknown
  misc_feature (1)..( 12): Result.006 file - promoters50/5664873
gcctttaaaaaa

SEQ ID NO: 198159 - DNA, 15 bp, Unknown
  misc_feature (1)..( 15): Result.006 file - promoters50/5664873
tttacaaatgtacaa

SEQ ID NO: 198160 - DNA, 15 bp, Unknown
  misc_feature (1)..( 15): Result.006 file - promoters50/5664873
tttaaaaaactttat

SEQ ID NO: 198161 - DNA, 15 bp, Unknown
  misc_feature (1)..( 15): Result.006 file - promoters50/5664873
tttaaacgccgtcgt

SEQ ID NO: 198162 - DNA, 15 bp, Unknown
  misc_feature (1)..( 15): Result.006 file - promoters50/5664873
gttaaaaattgttga

SEQ ID NO: 198163 - DNA, 15 bp, Unknown
  misc_feature (1)..( 15): Result.006 file - promoters50/5664873
accaaaaaaggaaga

SEQ ID NO: 198164 - DNA, 15 bp, Unknown
  misc_feature (1)..( 15): Result.006 file - promoters50/5664893
aacaaaatttggtga

SEQ ID NO: 198165 - DNA, 9 bp, Unknown
  misc_feature (1)..( 9): Result.006 file - promoters50/5664893
ttttcaata

SEQ ID NO: 198166 - DNA, 9 bp, Unknown
  misc_feature (1)..( 9): Result.006 file - promoters50/5664893
aattccata

SEQ ID NO: 198167 - DNA, 9 bp, Unknown
  misc_feature (1)..( 9): Result.006 file - promoters50/5664942
aatgccagg

SEQ ID NO: 198168 - DNA, 6 bp, Unknown
  misc_feature (1)..( 6): Result.006 file - promoters50/5664942
aaaatc

SEQ ID NO: 198169 - DNA, 6 bp, Unknown
  misc_feature (1)..( 6): Result.006 file - promoters50/5664942
aaaatc

SEQ ID NO: 198170 - DNA, 6 bp, Unknown
  misc_feature (1)..( 6): Result.006 file - promoters50/5664942
aaaatc

SEQ ID NO: 198171 - DNA, 9 bp, Unknown
  misc_feature (1)..( 9): Result.006 file - promoters50/5664942
ctcaactta

SEQ ID NO: 198172 - DNA, 9 bp, Unknown
  misc_feature (1)..( 9): Result.006 file - promoters50/5664942
aggaactta

SEQ ID NO: 198173 - DNA, 9 bp, Unknown
  misc_feature (1)..( 9): Result.006 file - promoters50/5665027
ctcatcttc

SEQ ID NO: 198174 - DNA, 11 bp, Unknown
  misc_feature (1)..( 11): Result.006 file - promoters50/5665027
ttccttataaa

SEQ ID NO: 198175 - DNA, 11 bp, Unknown
  misc_feature (1)..( 11): Result.006 file - promoters50/5665027
ctccttataaa

SEQ ID NO: 198176 - DNA, 11 bp, Unknown
  misc_feature (1)..( 11): Result.006 file - promoters50/5665027
ctccctataaa

SEQ ID NO: 198177 - DNA, 9 bp, Unknown
  misc_feature (1)..( 9): Result.006 file - promoters50/5665027
tttattctt

SEQ ID NO: 198178 - DNA, 9 bp, Unknown
  misc_feature (1)..( 9): Result.006 file - promoters50/5665027
cttattcat

SEQ ID NO: 198179 - DNA, 9 bp, Unknown
  misc_feature (1)..( 9): Result.006 file - promoters50/5665027
tttattctt

SEQ ID NO: 198180 - DNA, 8 bp, Unknown
  misc_feature (1)..( 8): Result.006 file - promoters50/5665027
ttttcttc

SEQ ID NO: 198181 - DNA, 8 bp, Unknown
  misc_feature (1)..( 8): Result.006 file - promoters50/5665027
ttttctta

SEQ ID NO: 198182 - DNA, 8 bp, Unknown
  misc_feature (1)..( 8): Result.006 file - promoters50/5665027
ttttttta

SEQ ID NO: 198183 - DNA, 13 bp, Unknown
  misc_feature (1)..( 13): Result.006 file - promoters50/5665027
tgatcaaaagttt

SEQ ID NO: 198184 - DNA, 13 bp, Unknown
  misc_feature (1)..( 13): Result.006 file - promoters50/5665027
aaaccaaaatttt

SEQ ID NO: 198185 - DNA, 13 bp, Unknown
  misc_feature (1)..( 13): Result.006 file - promoters50/5665071
aaaccaaaatacc

SEQ ID NO: 198186 - DNA, 9 bp, Unknown
  misc_feature (1)..( 9): Result.006 file - promoters50/5665071
ttaaacaat

SEQ ID NO: 198187 - DNA, 9 bp, Unknown
  misc_feature (1)..( 9): Result.006 file - promoters50/5665071
ttaatcaat

SEQ ID NO: 198188 - DNA, 9 bp, Unknown
  misc_feature (1)..( 9): Result.006 file - promoters50/5665071
ttattcatg

SEQ ID NO: 198189 - DNA, 9 bp, Unknown
  misc_feature (1)..( 9): Result.006 file - promoters50/5665071
tcttaagct

SEQ ID NO: 198190 - DNA, 9 bp, Unknown
  misc_feature (1)..( 9): Result.006 file - promoters50/5665071
gattaagct

SEQ ID NO: 198191 - DNA, 9 bp, Unknown
  misc_feature (1)..( 9): Result.006 file - promoters50/5665071
gataaaggg

SEQ ID NO: 198192 - DNA, 16 bp, Unknown
  misc_feature (1)..( 16): Result.006 file - promoters50/5665071
caacaacacaagaaga

SEQ ID NO: 198193 - DNA, 16 bp, Unknown
  misc_feature (1)..( 16): Result.006 file - promoters50/5665071
caaaaactcaagattt

SEQ ID NO: 198194 - DNA, 16 bp, Unknown
  misc_feature (1)..( 16): Result.006 file - promoters50/5665083
agagctctcaaggttt

SEQ ID NO: 198195 - DNA, 7 bp, Unknown
  misc_feature (1)..( 7): Result.006 file - promoters50/5665083
gttttta

SEQ ID NO: 198196 - DNA, 7 bp, Unknown
  misc_feature (1)..( 7): Result.006 file - promoters50/5665083
tttttta

SEQ ID NO: 198197 - DNA, 7 bp, Unknown
  misc_feature (1)..( 7): Result.006 file - promoters50/5665087
gttttta

SEQ ID NO: 198198 - DNA, 8 bp, Unknown
  misc_feature (1)..( 8): Result.006 file - promoters50/5665087
acaacatc

SEQ ID NO: 198199 - DNA, 8 bp, Unknown
  misc_feature (1)..( 8): Result.006 file - promoters50/5665087
tcaaaatc

SEQ ID NO: 198200 - DNA, 8 bp, Unknown
  misc_feature (1)..( 8): Result.006 file - promoters50/5665087
tcataata

SEQ ID NO: 198201 - DNA, 6 bp, Unknown
  misc_feature (1)..( 6): Result.006 file - promoters50/5665087
aaaact

SEQ ID NO: 198202 - DNA, 6 bp, Unknown
  misc_feature (1)..( 6): Result.006 file - promoters50/5665087
aaaact

SEQ ID NO: 198203 - DNA, 6 bp, Unknown
  misc_feature (1)..( 6): Result.006 file - promoters50/5665087
aaaact

SEQ ID NO: 198204 - DNA, 11 bp, Unknown
  misc_feature (1)..( 11): Result.006 file - promoters50/5665087
ttttgtttatt

SEQ ID NO: 198205 - DNA, 11 bp, Unknown
  misc_feature (1)..( 11): Result.006 file - promoters50/5665087
ttttgattaaa

SEQ ID NO: 198206 - DNA, 11 bp, Unknown
  misc_feature (1)..( 11): Result.006 file - promoters50/5665140
ccgcgtttatt

SEQ ID NO: 198207 - DNA, 14 bp, Unknown
  misc_feature (1)..( 14): Result.006 file - promoters50/5665140
cagtgttttcaaac

SEQ ID NO: 198208 - DNA, 14 bp, Unknown
  misc_feature (1)..( 14): Result.006 file - promoters50/5665140
agccctttacaaat

SEQ ID NO: 198209 - DNA, 14 bp, Unknown
  misc_feature (1)..( 14): Result.006 file - promoters50/5665140
gagtatttttaaaa

SEQ ID NO: 198210 - DNA, 14 bp, Unknown
  misc_feature (1)..( 14): Result.006 file - promoters50/5665140
gagaattgagtaca

SEQ ID NO: 198211 - DNA, 14 bp, Unknown
  misc_feature (1)..( 14): Result.006 file - promoters50/5665140
atttttttttattt

SEQ ID NO: 198212 - DNA, 14 bp, Unknown
  misc_feature (1)..( 14): Result.006 file - promoters50/5665140
atctgttttcaaaa

SEQ ID NO: 198213 - DNA, 14 bp, Unknown
  misc_feature (1)..( 14): Result.006 file - promoters50/5665140
ctccatttaatttt

SEQ ID NO: 198214 - DNA, 14 bp, Unknown
  misc_feature (1)..( 14): Result.006 file - promoters50/5665140
gttgatttaatcat

SEQ ID NO: 198215 - DNA, 14 bp, Unknown
  misc_feature (1)..( 14): Result.006 file - promoters50/5665140
gaaactttaatgaa

SEQ ID NO: 198216 - DNA, 14 bp, Unknown
  misc_feature (1)..( 14): Result.006 file - promoters50/5665140
gtgatttgaattaa

SEQ ID NO: 198217 - DNA, 14 bp, Unknown
  misc_feature (1)..( 14): Result.006 file - promoters50/5665140
gaaagtttaaaaag

SEQ ID NO: 198218 - DNA, 14 bp, Unknown
  misc_feature (1)..( 14): Result.006 file - promoters50/5665140
gaaaattttttttt

SEQ ID NO: 198219 - DNA, 11 bp, Unknown
  misc_feature (1)..( 11): Result.006 file - promoters50/5665140
gttaaatgtat

SEQ ID NO: 198220 - DNA, 11 bp, Unknown
  misc_feature (1)..( 11): Result.006 file - promoters50/5665140
gtttaatgtta

SEQ ID NO: 198221 - DNA, 11 bp, Unknown
  misc_feature (1)..( 11): Result.006 file - promoters50/5665140
attacatgttc

SEQ ID NO: 198222 - DNA, 11 bp, Unknown
  misc_feature (1)..( 11): Result.006 file - promoters50/5665140
accaaatctta

SEQ ID NO: 198223 - DNA, 11 bp, Unknown
  misc_feature (1)..( 11): Result.006 file - promoters50/5665140
aataaagctta

SEQ ID NO: 198224 - DNA, 11 bp, Unknown
  misc_feature (1)..( 11): Result.006 file - promoters50/5665199
atttattgttt

SEQ ID NO: 198225 - DNA, 8 bp, Unknown
  misc_feature (1)..( 8): Result.006 file - promoters50/5665199
aaaaaata

SEQ ID NO: 198226 - DNA, 8 bp, Unknown
  misc_feature (1)..( 8): Result.006 file - promoters50/5665199
aaacaatt

SEQ ID NO: 198227 - DNA, 8 bp, Unknown
  misc_feature (1)..( 8): Result.006 file - promoters50/5665199
aaaatata

SEQ ID NO: 198228 - DNA, 8 bp, Unknown
  misc_feature (1)..( 8): Result.006 file - promoters50/5665199
cttgaaaa

SEQ ID NO: 198229 - DNA, 8 bp, Unknown
  misc_feature (1)..( 8): Result.006 file - promoters50/5665199
actgaaaa

SEQ ID NO: 198230 - DNA, 8 bp, Unknown
  misc_feature (1)..( 8): Result.006 file - promoters50/5665199
actcaaat

SEQ ID NO: 198231 - DNA, 9 bp, Unknown
  misc_feature (1)..( 9): Result.006 file - promoters50/5665199
tacataata

SEQ ID NO: 198232 - DNA, 9 bp, Unknown
  misc_feature (1)..( 9): Result.006 file - promoters50/5665199
aacaaaata

SEQ ID NO: 198233 - DNA, 9 bp, Unknown
  misc_feature (1)..( 9): Result.006 file - promoters50/5665199
aacaaacaa

SEQ ID NO: 198234 - DNA, 8 bp, Unknown
  misc_feature (1)..( 8): Result.006 file - promoters50/5665199
tgggccaa

SEQ ID NO: 198235 - DNA, 8 bp, Unknown
  misc_feature (1)..( 8): Result.006 file - promoters50/5665199
tggcccaa

SEQ ID NO: 198236 - DNA, 8 bp, Unknown
  misc_feature (1)..( 8): Result.006 file - promoters50/5665260
aggcccac

SEQ ID NO: 198237 - DNA, 7 bp, Unknown
  misc_feature (1)..( 7): Result.006 file - promoters50/5665260
tgaatta

SEQ ID NO: 198238 - DNA, 7 bp, Unknown
  misc_feature (1)..( 7): Result.006 file - promoters50/5665260
tgaattg

SEQ ID NO: 198239 - DNA, 7 bp, Unknown
  misc_feature (1)..( 7): Result.006 file - promoters50/5665260
tgaatta

SEQ ID NO: 198240 - DNA, 7 bp, Unknown
  misc_feature (1)..( 7): Result.006 file - promoters50/5665260
gaagata

SEQ ID NO: 198241 - DNA, 7 bp, Unknown
  misc_feature (1)..( 7): Result.006 file - promoters50/5665260
gaagatg

SEQ ID NO: 198242 - DNA, 7 bp, Unknown
  misc_feature (1)..( 7): Result.006 file - promoters50/5665279
gaagata

SEQ ID NO: 198243 - DNA, 11 bp, Unknown
  misc_feature (1)..( 11): Result.006 file - promoters50/5665279
gctagagtctc

SEQ ID NO: 198244 - DNA, 11 bp, Unknown
  misc_feature (1)..( 11): Result.006 file - promoters50/5665279
actatagtttg

SEQ ID NO: 198245 - DNA, 11 bp, Unknown
  misc_feature (1)..( 11): Result.006 file - promoters50/5665279
actatagaaac

SEQ ID NO: 198246 - DNA, 11 bp, Unknown
  misc_feature (1)..( 11): Result.006 file - promoters50/5665279
ccaatagtttg

SEQ ID NO: 198247 - DNA, 12 bp, Unknown
  misc_feature (1)..( 12): Result.006 file - promoters50/5665279
ttattttttcct

SEQ ID NO: 198248 - DNA, 12 bp, Unknown
  misc_feature (1)..( 12): Result.006 file - promoters50/5665279
ttattctttgat

SEQ ID NO: 198249 - DNA, 12 bp, Unknown
  misc_feature (1)..( 12): Result.006 file - promoters50/5665279
tagttcattgat

SEQ ID NO: 198250 - DNA, 12 bp, Unknown
  misc_feature (1)..( 12): Result.006 file - promoters50/5665283
atatacttgaat

SEQ ID NO: 198251 - DNA, 13 bp, Unknown
  misc_feature (1)..( 13): Result.006 file - promoters50/5665283
attgtatacatat

SEQ ID NO: 198252 - DNA, 13 bp, Unknown
  misc_feature (1)..( 13): Result.006 file - promoters50/5665283
attggatagatat

SEQ ID NO: 198253 - DNA, 13 bp, Unknown
  misc_feature (1)..( 13): Result.006 file - promoters50/5665283
attttataatata

SEQ ID NO: 198254 - DNA, 13 bp, Unknown
  misc_feature (1)..( 13): Result.006 file - promoters50/5665283
cttagacacattt

SEQ ID NO: 198255 - DNA, 13 bp, Unknown
  misc_feature (1)..( 13): Result.006 file - promoters50/5665283
cttggattctaat

SEQ ID NO: 198256 - DNA, 9 bp, Unknown
  misc_feature (1)..( 9): Result.006 file - promoters50/5665283
attaatatt

SEQ ID NO: 198257 - DNA, 9 bp, Unknown
  misc_feature (1)..( 9): Result.006 file - promoters50/5665283
tttaataat

SEQ ID NO: 198258 - DNA, 9 bp, Unknown
  misc_feature (1)..( 9): Result.006 file - promoters50/5665283
tttactatt

SEQ ID NO: 198259 - DNA, 9 bp, Unknown
  misc_feature (1)..( 9): Result.006 file - promoters50/5665283
atttatatt

SEQ ID NO: 198260 - DNA, 9 bp, Unknown
  misc_feature (1)..( 9): Result.006 file - promoters50/5665306
attgatatt

SEQ ID NO: 198261 - DNA, 8 bp, Unknown
  misc_feature (1)..( 8): Result.006 file - promoters50/5665306
aaaaagaa

SEQ ID NO: 198262 - DNA, 8 bp, Unknown
  misc_feature (1)..( 8): Result.006 file - promoters50/5665306
gaaacgaa

SEQ ID NO: 198263 - DNA, 8 bp, Unknown
  misc_feature (1)..( 8): Result.006 file - promoters50/5665306
gaaacgtt

SEQ ID NO: 198264 - DNA, 10 bp, Unknown
  misc_feature (1)..( 10): Result.006 file - promoters50/5665306
attcgatttg

SEQ ID NO: 198265 - DNA, 10 bp, Unknown
  misc_feature (1)..( 10): Result.006 file - promoters50/5665306
attcgttttg

SEQ ID NO: 198266 - DNA, 10 bp, Unknown
  misc_feature (1)..( 10): Result.006 file - promoters50/5665314
cgtcgtttaa

SEQ ID NO: 198267 - DNA, 8 bp, Unknown
  misc_feature (1)..( 8): Result.006 file - promoters50/5665314
agaaggag

SEQ ID NO: 198268 - DNA, 8 bp, Unknown
  misc_feature (1)..( 8): Result.006 file - promoters50/5665314
taaaggag

SEQ ID NO: 198269 - DNA, 8 bp, Unknown
  misc_feature (1)..( 8): Result.006 file - promoters50/5665314
taaaggat

SEQ ID NO: 198270 - DNA, 8 bp, Unknown
  misc_feature (1)..( 8): Result.006 file - promoters50/5665314
ttttgagt

SEQ ID NO: 198271 - DNA, 8 bp, Unknown
  misc_feature (1)..( 8): Result.006 file - promoters50/5665314
gtttgagt

SEQ ID NO: 198272 - DNA, 8 bp, Unknown
  misc_feature (1)..( 8): Result.006 file - promoters50/5665326
ttttgata

SEQ ID NO: 198273 - DNA, 11 bp, Unknown
  misc_feature (1)..( 11): Result.006 file - promoters50/5665326
aaatcattatt

SEQ ID NO: 198274 - DNA, 11 bp, Unknown
  misc_feature (1)..( 11): Result.006 file - promoters50/5665326
taattattata

SEQ ID NO: 198275 - DNA, 11 bp, Unknown
  misc_feature (1)..( 11): Result.006 file - promoters50/5665326
tatatataata

SEQ ID NO: 198276 - DNA, 11 bp, Unknown
  misc_feature (1)..( 11): Result.006 file - promoters50/5665326
gtcatataaca

SEQ ID NO: 198277 - DNA, 11 bp, Unknown
  misc_feature (1)..( 11): Result.006 file - promoters50/5665326
taattatctca

SEQ ID NO: 198278 - DNA, 11 bp, Unknown
  misc_feature (1)..( 11): Result.006 file - promoters50/5665326
taattaagttt

SEQ ID NO: 198279 - DNA, 12 bp, Unknown
  misc_feature (1)..( 12): Result.006 file - promoters50/5665326
aaaaagcataca

SEQ ID NO: 198280 - DNA, 12 bp, Unknown
  misc_feature (1)..( 12): Result.006 file - promoters50/5665326
tgaaatcataat

SEQ ID NO: 198281 - DNA, 12 bp, Unknown
  misc_feature (1)..( 12): Result.006 file - promoters50/5665326
caaaaccatttg

SEQ ID NO: 198282 - DNA, 12 bp, Unknown
  misc_feature (1)..( 12): Result.006 file - promoters50/5665326
cttactcataat

SEQ ID NO: 198283 - DNA, 12 bp, Unknown
  misc_feature (1)..( 12): Result.006 file - promoters50/5665326
ccctatcatata

SEQ ID NO: 198284 - DNA, 12 bp, Unknown
  misc_feature (1)..( 12): Result.006 file - promoters50/5665326
tgacatctgatc

SEQ ID NO: 198285 - DNA, 12 bp, Unknown
  misc_feature (1)..( 12): Result.006 file - promoters50/5665343
ggaattcactga

SEQ ID NO: 198286 - DNA, 11 bp, Unknown
  misc_feature (1)..( 11): Result.006 file - promoters50/5665343
tttttttattt

SEQ ID NO: 198287 - DNA, 11 bp, Unknown
  misc_feature (1)..( 11): Result.006 file - promoters50/5665343
ttttttttttt

SEQ ID NO: 198288 - DNA, 11 bp, Unknown
  misc_feature (1)..( 11): Result.006 file - promoters50/5665343
tttttttaata

SEQ ID NO: 198289 - DNA, 8 bp, Unknown
  misc_feature (1)..( 8): Result.006 file - promoters50/5665343
acttattt

SEQ ID NO: 198290 - DNA, 8 bp, Unknown
  misc_feature (1)..( 8): Result.006 file - promoters50/5665343
acttcttt

SEQ ID NO: 198291 - DNA, 8 bp, Unknown
  misc_feature (1)..( 8): Result.006 file - promoters50/5665343
acttatta

SEQ ID NO: 198292 - DNA, 13 bp, Unknown
  misc_feature (1)..( 13): Result.006 file - promoters50/5665343
ctaaatactttga

SEQ ID NO: 198293 - DNA, 13 bp, Unknown
  misc_feature (1)..( 13): Result.006 file - promoters50/5665343
ctaaaaactatga

SEQ ID NO: 198294 - DNA, 13 bp, Unknown
  misc_feature (1)..( 13): Result.006 file - promoters50/5665343
aaaaaaactagtt

SEQ ID NO: 198295 - DNA, 7 bp, Unknown
  misc_feature (1)..( 7): Result.006 file - promoters50/5665343
ttgttta

SEQ ID NO: 198296 - DNA, 7 bp, Unknown
  misc_feature (1)..( 7): Result.006 file - promoters50/5665343
ttgtttc

SEQ ID NO: 198297 - DNA, 7 bp, Unknown
  misc_feature (1)..( 7): Result.006 file - promoters50/5665343
ttgattc

SEQ ID NO: 198298 - DNA, 7 bp, Unknown
  misc_feature (1)..( 7): Result.006 file - promoters50/5665343
gaggaaa

SEQ ID NO: 198299 - DNA, 7 bp, Unknown
  misc_feature (1)..( 7): Result.006 file - promoters50/5665343
gagaaaa

SEQ ID NO: 198300 - DNA, 7 bp, Unknown
  misc_feature (1)..( 7): Result.006 file - promoters50/5665343
gaagaaa

SEQ ID NO: 198301 - DNA, 8 bp, Unknown
  misc_feature (1)..( 8): Result.006 file - promoters50/5665343
cctaagtt

SEQ ID NO: 198302 - DNA, 8 bp, Unknown
  misc_feature (1)..( 8): Result.006 file - promoters50/5665343
tttaagtt

SEQ ID NO: 198303 - DNA, 8 bp, Unknown
  misc_feature (1)..( 8): Result.006 file - promoters50/5665347
ttttagtg

SEQ ID NO: 198304 - DNA, 12 bp, Unknown
  misc_feature (1)..( 12): Result.006 file - promoters50/5665347
actataaatact

SEQ ID NO: 198305 - DNA, 12 bp, Unknown
  misc_feature (1)..( 12): Result.006 file - promoters50/5665347
tatataaatcct

SEQ ID NO: 198306 - DNA, 12 bp, Unknown
  misc_feature (1)..( 12): Result.006 file - promoters50/5665347
ggtatatatata

SEQ ID NO: 198307 - DNA, 12 bp, Unknown
  misc_feature (1)..( 12): Result.006 file - promoters50/5665347
actataaacaaa

SEQ ID NO: 198308 - DNA, 12 bp, Unknown
  misc_feature (1)..( 12): Result.006 file - promoters50/5665347
tttatgaatcca

SEQ ID NO: 198309 - DNA, 12 bp, Unknown
  misc_feature (1)..( 12): Result.006 file - promoters50/5665347
ccaataaaaagc

SEQ ID NO: 198310 - DNA, 12 bp, Unknown
  misc_feature (1)..( 12): Result.006 file - promoters50/5665347
tatatttatata

SEQ ID NO: 198311 - DNA, 14 bp, Unknown
  misc_feature (1)..( 14): Result.006 file - promoters50/5665347
tcaatttaatcaat

SEQ ID NO: 198312 - DNA, 14 bp, Unknown
  misc_feature (1)..( 14): Result.006 file - promoters50/5665347
aagggaaaatgaat

SEQ ID NO: 198313 - DNA, 14 bp, Unknown
  misc_feature (1)..( 14): Result.006 file - promoters50/5665347
taattttattcagg

SEQ ID NO: 198314 - DNA, 14 bp, Unknown
  misc_feature (1)..( 14): Result.006 file - promoters50/5665347
gtaatttattttcc

SEQ ID NO: 198315 - DNA, 14 bp, Unknown
  misc_feature (1)..( 14): Result.006 file - promoters50/5665347
caaaagttatgaat

SEQ ID NO: 198316 - DNA, 14 bp, Unknown
  misc_feature (1)..( 14): Result.006 file - promoters50/5665347
agttataaatcgtt

SEQ ID NO: 198317 - DNA, 14 bp, Unknown
  misc_feature (1)..( 14): Result.006 file - promoters50/5665351
tggttttattattc

SEQ ID NO: 198318 - DNA, 10 bp, Unknown
  misc_feature (1)..( 10): Result.006 file - promoters50/5665351
attgtatctt

SEQ ID NO: 198319 - DNA, 10 bp, Unknown
  misc_feature (1)..( 10): Result.006 file - promoters50/5665351
attggatccg

SEQ ID NO: 198320 - DNA, 10 bp, Unknown
  misc_feature (1)..( 10): Result.006 file - promoters50/5665351
attatatagg

SEQ ID NO: 198321 - DNA, 10 bp, Unknown
  misc_feature (1)..( 10): Result.006 file - promoters50/5665351
tctgtttctt

SEQ ID NO: 198322 - DNA, 10 bp, Unknown
  misc_feature (1)..( 10): Result.006 file - promoters50/5665367
attataacgt

SEQ ID NO: 198323 - DNA, 11 bp, Unknown
  misc_feature (1)..( 11): Result.006 file - promoters50/5665367
caaaattagac

SEQ ID NO: 198324 - DNA, 11 bp, Unknown
  misc_feature (1)..( 11): Result.006 file - promoters50/5665367
ataaaataggt

SEQ ID NO: 198325 - DNA, 11 bp, Unknown
  misc_feature (1)..( 11): Result.006 file - promoters50/5665367
agaaaatagaa

SEQ ID NO: 198326 - DNA, 11 bp, Unknown
  misc_feature (1)..( 11): Result.006 file - promoters50/5665367
tttaataagac

SEQ ID NO: 198327 - DNA, 11 bp, Unknown
  misc_feature (1)..( 11): Result.006 file - promoters50/5665367
ataaaatgtag

SEQ ID NO: 198328 - DNA, 11 bp, Unknown
  misc_feature (1)..( 11): Result.006 file - promoters50/5665367
tataagtaaat

SEQ ID NO: 198329 - DNA, 11 bp, Unknown
  misc_feature (1)..( 11): Result.006 file - promoters50/5665367
gttaagaaaac

SEQ ID NO: 198330 - DNA, 11 bp, Unknown
  misc_feature (1)..( 11): Result.006 file - promoters50/5665367
ataacgtaaat

SEQ ID NO: 198331 - DNA, 11 bp, Unknown
  misc_feature (1)..( 11): Result.006 file - promoters50/5665367
atacaaaatta

SEQ ID NO: 198332 - DNA, 11 bp, Unknown
  misc_feature (1)..( 11): Result.006 file - promoters50/5665367
caacaaaatag

SEQ ID NO: 198333 - DNA, 11 bp, Unknown
  misc_feature (1)..( 11): Result.006 file - promoters50/5665367
agcgaaagtta

SEQ ID NO: 198334 - DNA, 11 bp, Unknown
  misc_feature (1)..( 11): Result.006 file - promoters50/5665367
ttataaaataa

SEQ ID NO: 198335 - DNA, 11 bp, Unknown
  misc_feature (1)..( 11): Result.006 file - promoters50/5665367
ttagaaaatgc

SEQ ID NO: 198336 - DNA, 11 bp, Unknown
  misc_feature (1)..( 11): Result.006 file - promoters50/5665367
atagacaatta

SEQ ID NO: 198337 - DNA, 11 bp, Unknown
  misc_feature (1)..( 11): Result.006 file - promoters50/5665367
tgataaactaa

SEQ ID NO: 198338 - DNA, 10 bp, Unknown
  misc_feature (1)..( 10): Result.006 file - promoters50/5665367
actatataaa

SEQ ID NO: 198339 - DNA, 10 bp, Unknown
  misc_feature (1)..( 10): Result.006 file - promoters50/5665367
tgtatatata

SEQ ID NO: 198340 - DNA, 10 bp, Unknown
  misc_feature (1)..( 10): Result.006 file - promoters50/5665367
aatatatata

SEQ ID NO: 198341 - DNA, 10 bp, Unknown
  misc_feature (1)..( 10): Result.006 file - promoters50/5665367
ctaatataaa

SEQ ID NO: 198342 - DNA, 10 bp, Unknown
  misc_feature (1)..( 10): Result.006 file - promoters50/5665367
actatatata

SEQ ID NO: 198343 - DNA, 10 bp, Unknown
  misc_feature (1)..( 10): Result.006 file - promoters50/5665371
tctatataaa

SEQ ID NO: 198344 - DNA, 9 bp, Unknown
  misc_feature (1)..( 9): Result.006 file - promoters50/5665371
aaaatttct

SEQ ID NO: 198345 - DNA, 9 bp, Unknown
  misc_feature (1)..( 9): Result.006 file - promoters50/5665371
aaactttaa

SEQ ID NO: 198346 - DNA, 9 bp, Unknown
  misc_feature (1)..( 9): Result.006 file - promoters50/5665371
aaaatctct

SEQ ID NO: 198347 - DNA, 8 bp, Unknown
  misc_feature (1)..( 8): Result.006 file - promoters50/5665371
tgtgaaac

SEQ ID NO: 198348 - DNA, 8 bp, Unknown
  misc_feature (1)..( 8): Result.006 file - promoters50/5665371
tttgaaac

SEQ ID NO: 198349 - DNA, 8 bp, Unknown
  misc_feature (1)..( 8): Result.006 file - promoters50/5665371
tgtgaaaa

SEQ ID NO: 198350 - DNA, 9 bp, Unknown
  misc_feature (1)..( 9): Result.006 file - promoters50/5665371
aaaatttct

SEQ ID NO: 198351 - DNA, 9 bp, Unknown
  misc_feature (1)..( 9): Result.006 file - promoters50/5665371
gatatttct

SEQ ID NO: 198352 - DNA, 9 bp, Unknown
  misc_feature (1)..( 9): Result.006 file - promoters50/5665371
aaaatctct

SEQ ID NO: 198353 - DNA, 9 bp, Unknown
  misc_feature (1)..( 9): Result.006 file - promoters50/5665371
tatcaaaat

SEQ ID NO: 198354 - DNA, 9 bp, Unknown
  misc_feature (1)..( 9): Result.006 file - promoters50/5665371
tttcaaaat

SEQ ID NO: 198355 - DNA, 9 bp, Unknown
  misc_feature (1)..( 9): Result.006 file - promoters50/5665374
ttttaaaat

SEQ ID NO: 198356 - DNA, 12 bp, Unknown
  misc_feature (1)..( 12): Result.006 file - promoters50/5665374
taatacatttat

SEQ ID NO: 198357 - DNA, 12 bp, Unknown
  misc_feature (1)..( 12): Result.006 file - promoters50/5665374
taaaacaaaaaa

SEQ ID NO: 198358 - DNA, 12 bp, Unknown
  misc_feature (1)..( 12): Result.006 file - promoters50/5665374
caaaacaaaaaa

SEQ ID NO: 198359 - DNA, 12 bp, Unknown
  misc_feature (1)..( 12): Result.006 file - promoters50/5665374
caaaacaaattt

SEQ ID NO: 198360 - DNA, 12 bp, Unknown
  misc_feature (1)..( 12): Result.006 file - promoters50/5665374
caaaaccagttt

SEQ ID NO: 198361 - DNA, 11 bp, Unknown
  misc_feature (1)..( 11): Result.006 file - promoters50/5665374
cactatctaaa

SEQ ID NO: 198362 - DNA, 11 bp, Unknown
  misc_feature (1)..( 11): Result.006 file - promoters50/5665374
agctatctaaa

SEQ ID NO: 198363 - DNA, 11 bp, Unknown
  misc_feature (1)..( 11): Result.006 file - promoters50/5665374
tactttctctg

SEQ ID NO: 198364 - DNA, 11 bp, Unknown
  misc_feature (1)..( 11): Result.006 file - promoters50/5665374
cataatcaaaa

SEQ ID NO: 198365 - DNA, 11 bp, Unknown
  misc_feature (1)..( 11): Result.006 file - promoters50/5665374
tactttaggat

SEQ ID NO: 198366 - DNA, 12 bp, Unknown
  misc_feature (1)..( 12): Result.006 file - promoters50/5665374
ttagaaaatatg

SEQ ID NO: 198367 - DNA, 12 bp, Unknown
  misc_feature (1)..( 12): Result.006 file - promoters50/5665374
accgaaaaaatg

SEQ ID NO: 198368 - DNA, 12 bp, Unknown
  misc_feature (1)..( 12): Result.006 file - promoters50/5665374
ttggaaaataaa

SEQ ID NO: 198369 - DNA, 12 bp, Unknown
  misc_feature (1)..( 12): Result.006 file - promoters50/5665374
gagagaaataaa

SEQ ID NO: 198370 - DNA, 13 bp, Unknown
  misc_feature (1)..( 13): Result.006 file - promoters50/5665374
agagaaagaaacg

SEQ ID NO: 198371 - DNA, 11 bp, Unknown
  misc_feature (1)..( 11): Result.006 file - promoters50/5665374
ttaacaaacca

SEQ ID NO: 198372 - DNA, 11 bp, Unknown
  misc_feature (1)..( 11): Result.006 file - promoters50/5665374
aaaacaaaaaa

SEQ ID NO: 198373 - DNA, 11 bp, Unknown
  misc_feature (1)..( 11): Result.006 file - promoters50/5665374
ttaccaattcc

SEQ ID NO: 198374 - DNA, 11 bp, Unknown
  misc_feature (1)..( 11): Result.006 file - promoters50/5665374
aaaacaaaaaa

SEQ ID NO: 198375 - DNA, 11 bp, Unknown
  misc_feature (1)..( 11): Result.006 file - promoters50/5665374
aaaacaaattt

SEQ ID NO: 198376 - DNA, 10 bp, Unknown
  misc_feature (1)..( 10): Result.006 file - promoters50/5665374
aaattcagaa

SEQ ID NO: 198377 - DNA, 10 bp, Unknown
  misc_feature (1)..( 10): Result.006 file - promoters50/5665374
gaatttagat

SEQ ID NO: 198378 - DNA, 10 bp, Unknown
  misc_feature (1)..( 10): Result.006 file - promoters50/5665374
ggatttttgg

SEQ ID NO: 198379 - DNA, 10 bp, Unknown
  misc_feature (1)..( 10): Result.006 file - promoters50/5665374
tcattttttg

SEQ ID NO: 198380 - DNA, 10 bp, Unknown
  misc_feature (1)..( 10): Result.006 file - promoters50/5665382
ctttttgttg

SEQ ID NO: 198381 - DNA, 8 bp, Unknown
  misc_feature (1)..( 8): Result.006 file - promoters50/5665382
tttataaa

SEQ ID NO: 198382 - DNA, 8 bp, Unknown
  misc_feature (1)..( 8): Result.006 file - promoters50/5665382
gatataaa

SEQ ID NO: 198383 - DNA, 8 bp, Unknown
  misc_feature (1)..( 8): Result.006 file - promoters50/5665382
ataataaa

SEQ ID NO: 198384 - DNA, 10 bp, Unknown
  misc_feature (1)..( 10): Result.006 file - promoters50/5665382
ttacttttag

SEQ ID NO: 198385 - DNA, 10 bp, Unknown
  misc_feature (1)..( 10): Result.006 file - promoters50/5665382
ttaatttgat

SEQ ID NO: 198386 - DNA, 10 bp, Unknown
  misc_feature (1)..( 10): Result.006 file - promoters50/5665386
tgaatctgat

SEQ ID NO: 198387 - DNA, 11 bp, Unknown
  misc_feature (1)..( 11): Result.006 file - promoters50/5665386
aataaataaaa

SEQ ID NO: 198388 - DNA, 11 bp, Unknown
  misc_feature (1)..( 11): Result.006 file - promoters50/5665386
aataaagtcct

SEQ ID NO: 198389 - DNA, 11 bp, Unknown
  misc_feature (1)..( 11): Result.006 file - promoters50/5665386
tataatgtcct

SEQ ID NO: 198390 - DNA, 9 bp, Unknown
  misc_feature (1)..( 9): Result.006 file - promoters50/5665386
tatcttttt

SEQ ID NO: 198391 - DNA, 9 bp, Unknown
  misc_feature (1)..( 9): Result.006 file - promoters50/5665386
cttctattt

SEQ ID NO: 198392 - DNA, 9 bp, Unknown
  misc_feature (1)..( 9): Result.006 file - promoters50/5665386
cttcttttt

SEQ ID NO: 198393 - DNA, 9 bp, Unknown
  misc_feature (1)..( 9): Result.006 file - promoters50/5665386
tttcagtca

SEQ ID NO: 198394 - DNA, 9 bp, Unknown
  misc_feature (1)..( 9): Result.006 file - promoters50/5665386
tctcaatca

SEQ ID NO: 198395 - DNA, 9 bp, Unknown
  misc_feature (1)..( 9): Result.006 file - promoters50/5665386
tttgagttg

SEQ ID NO: 198396 - DNA, 8 bp, Unknown
  misc_feature (1)..( 8): Result.006 file - promoters50/5665386
caaaaatc

SEQ ID NO: 198397 - DNA, 8 bp, Unknown
  misc_feature (1)..( 8): Result.006 file - promoters50/5665386
caaagatc

SEQ ID NO: 198398 - DNA, 8 bp, Unknown
  misc_feature (1)..( 8): Result.006 file - promoters50/5665386
aaaaaata

SEQ ID NO: 198399 - DNA, 9 bp, Unknown
  misc_feature (1)..( 9): Result.006 file - promoters50/5665386
agtatctta

SEQ ID NO: 198400 - DNA, 9 bp, Unknown
  misc_feature (1)..( 9): Result.006 file - promoters50/5665386
agtttctta

SEQ ID NO: 198401 - DNA, 9 bp, Unknown
  misc_feature (1)..( 9): Result.006 file - promoters50/5665390
aatatatta

SEQ ID NO: 198402 - DNA, 7 bp, Unknown
  misc_feature (1)..( 7): Result.006 file - promoters50/5665390
attaatt

SEQ ID NO: 198403 - DNA, 7 bp, Unknown
  misc_feature (1)..( 7): Result.006 file - promoters50/5665390
tttaatt

SEQ ID NO: 198404 - DNA, 7 bp, Unknown
  misc_feature (1)..( 7): Result.006 file - promoters50/5665390
tttcatt

SEQ ID NO: 198405 - DNA, 9 bp, Unknown
  misc_feature (1)..( 9): Result.006 file - promoters50/5665390
ataaacaaa

SEQ ID NO: 198406 - DNA, 9 bp, Unknown
  misc_feature (1)..( 9): Result.006 file - promoters50/5665390
atatacatg

SEQ ID NO: 198407 - DNA, 9 bp, Unknown
  misc_feature (1)..( 9): Result.006 file - promoters50/5665390
ctacacaaa

SEQ ID NO: 198408 - DNA, 8 bp, Unknown
  misc_feature (1)..( 8): Result.006 file - promoters50/5665390
attattaa

SEQ ID NO: 198409 - DNA, 8 bp, Unknown
  misc_feature (1)..( 8): Result.006 file - promoters50/5665390
atttttac

SEQ ID NO: 198410 - DNA, 8 bp, Unknown
  misc_feature (1)..( 8): Result.006 file - promoters50/5665390
tattttac

SEQ ID NO: 198411 - DNA, 7 bp, Unknown
  misc_feature (1)..( 7): Result.006 file - promoters50/5665390
atttact

SEQ ID NO: 198412 - DNA, 7 bp, Unknown
  misc_feature (1)..( 7): Result.006 file - promoters50/5665390
attcact

SEQ ID NO: 198413 - DNA, 7 bp, Unknown
  misc_feature (1)..( 7): Result.006 file - promoters50/5665390
cttcact

SEQ ID NO: 198414 - DNA, 6 bp, Unknown
  misc_feature (1)..( 6): Result.006 file - promoters50/5665390
tttata

SEQ ID NO: 198415 - DNA, 6 bp, Unknown
  misc_feature (1)..( 6): Result.006 file - promoters50/5665390
tttata

SEQ ID NO: 198416 - DNA, 6 bp, Unknown
  misc_feature (1)..( 6): Result.006 file - promoters50/5665390
tttata

SEQ ID NO: 198417 - DNA, 11 bp, Unknown
  misc_feature (1)..( 11): Result.006 file - promoters50/5665390
cataaagaaaa

SEQ ID NO: 198418 - DNA, 11 bp, Unknown
  misc_feature (1)..( 11): Result.006 file - promoters50/5665390
cattaagggga

SEQ ID NO: 198419 - DNA, 11 bp, Unknown
  misc_feature (1)..( 11): Result.006 file - promoters50/5665390
attaaagcaaa

SEQ ID NO: 198420 - DNA, 10 bp, Unknown
  misc_feature (1)..( 10): Result.006 file - promoters50/5665390
aaaactaaag

SEQ ID NO: 198421 - DNA, 10 bp, Unknown
  misc_feature (1)..( 10): Result.006 file - promoters50/5665390
aaaattaaag

SEQ ID NO: 198422 - DNA, 11 bp, Unknown
  misc_feature (1)..( 11): Result.006 file - promoters50/5665404
aaaacttaaaa

SEQ ID NO: 198423 - DNA, 8 bp, Unknown
  misc_feature (1)..( 8): Result.006 file - promoters50/5665404
cttgcttt

SEQ ID NO: 198424 - DNA, 8 bp, Unknown
  misc_feature (1)..( 8): Result.006 file - promoters50/5665404
aatgcttt

SEQ ID NO: 198425 - DNA, 8 bp, Unknown
  misc_feature (1)..( 8): Result.006 file - promoters50/5665404
tttgtttt

SEQ ID NO: 198426 - DNA, 8 bp, Unknown
  misc_feature (1)..( 8): Result.006 file - promoters50/5665404
gtttattt

SEQ ID NO: 198427 - DNA, 8 bp, Unknown
  misc_feature (1)..( 8): Result.006 file - promoters50/5665404
gtttatgg

SEQ ID NO: 198428 - DNA, 10 bp, Unknown
  misc_feature (1)..( 10): Result.006 file - promoters50/5665404
ttttaaaatt

SEQ ID NO: 198429 - DNA, 10 bp, Unknown
  misc_feature (1)..( 10): Result.006 file - promoters50/5665404
aaataaaata

SEQ ID NO: 198430 - DNA, 10 bp, Unknown
  misc_feature (1)..( 10): Result.006 file - promoters50/5665404
aaatgaaata

SEQ ID NO: 198431 - DNA, 10 bp, Unknown
  misc_feature (1)..( 10): Result.006 file - promoters50/5665412
taatacaatt

SEQ ID NO: 198432 - DNA, 8 bp, Unknown
  misc_feature (1)..( 8): Result.006 file - promoters50/5665412
ttttcttg

SEQ ID NO: 198433 - DNA, 8 bp, Unknown
  misc_feature (1)..( 8): Result.006 file - promoters50/5665412
ttttctac

SEQ ID NO: 198434 - DNA, 8 bp, Unknown
  misc_feature (1)..( 8): Result.006 file - promoters50/5665412
atttgttg

SEQ ID NO: 198435 - DNA, 8 bp, Unknown
  misc_feature (1)..( 8): Result.006 file - promoters50/5665412
tttctttt

SEQ ID NO: 198436 - DNA, 8 bp, Unknown
  misc_feature (1)..( 8): Result.006 file - promoters50/5665412
tttcttct

SEQ ID NO: 198437 - DNA, 8 bp, Unknown
  misc_feature (1)..( 8): Result.006 file - promoters50/5665420
cttcttct

SEQ ID NO: 198438 - DNA, 12 bp, Unknown
  misc_feature (1)..( 12): Result.006 file - promoters50/5665420
ttttattttatt

SEQ ID NO: 198439 - DNA, 12 bp, Unknown
  misc_feature (1)..( 12): Result.006 file - promoters50/5665420
acacattttaca

SEQ ID NO: 198440 - DNA, 12 bp, Unknown
  misc_feature (1)..( 12): Result.006 file - promoters50/5665420
tttttttttagt

SEQ ID NO: 198441 - DNA, 12 bp, Unknown
  misc_feature (1)..( 12): Result.006 file - promoters50/5665420
ttgcatttttaa

SEQ ID NO: 198442 - DNA, 12 bp, Unknown
  misc_feature (1)..( 12): Result.006 file - promoters50/5665420
caacactttaca

SEQ ID NO: 198443 - DNA, 12 bp, Unknown
  misc_feature (1)..( 12): Result.006 file - promoters50/5665436
aacaactataca

SEQ ID NO: 198444 - DNA, 11 bp, Unknown
  misc_feature (1)..( 11): Result.006 file - promoters50/5665436
cataataattt

SEQ ID NO: 198445 - DNA, 11 bp, Unknown
  misc_feature (1)..( 11): Result.006 file - promoters50/5665436
attaataatta

SEQ ID NO: 198446 - DNA, 11 bp, Unknown
  misc_feature (1)..( 11): Result.006 file - promoters50/5665436
aataataacaa

SEQ ID NO: 198447 - DNA, 11 bp, Unknown
  misc_feature (1)..( 11): Result.006 file - promoters50/5665436
tataatatttt

SEQ ID NO: 198448 - DNA, 11 bp, Unknown
  misc_feature (1)..( 11): Result.006 file - promoters50/5665436
ttcaatgatta

SEQ ID NO: 198449 - DNA, 11 bp, Unknown
  misc_feature (1)..( 11): Result.006 file - promoters50/5665436
tttaatatgaa

SEQ ID NO: 198450 - DNA, 11 bp, Unknown
  misc_feature (1)..( 11): Result.006 file - promoters50/5665507
tataaaataca

SEQ ID NO: 198451 - DNA, 9 bp, Unknown
  misc_feature (1)..( 9): Result.006 file - promoters50/5665507
caatatccc

SEQ ID NO: 198452 - DNA, 9 bp, Unknown
  misc_feature (1)..( 9): Result.006 file - promoters50/5665507
aaatatctt

SEQ ID NO: 198453 - DNA, 9 bp, Unknown
  misc_feature (1)..( 9): Result.006 file - promoters50/5665507
ttatatcca

SEQ ID NO: 198454 - DNA, 9 bp, Unknown
  misc_feature (1)..( 9): Result.006 file - promoters50/5665507
tcatatcct

SEQ ID NO: 198455 - DNA, 9 bp, Unknown
  misc_feature (1)..( 9): Result.006 file - promoters50/5665507
ttatatctt

SEQ ID NO: 198456 - DNA, 9 bp, Unknown
  misc_feature (1)..( 9): Result.006 file - promoters50/5665507
aaatattag

SEQ ID NO: 198457 - DNA, 13 bp, Unknown
  misc_feature (1)..( 13): Result.006 file - promoters50/5665507
ctttttgatattt

SEQ ID NO: 198458 - DNA, 13 bp, Unknown
  misc_feature (1)..( 13): Result.006 file - promoters50/5665507
attttagattttt

SEQ ID NO: 198459 - DNA, 13 bp, Unknown
  misc_feature (1)..( 13): Result.006 file - promoters50/5665507
tactttgatcatt

SEQ ID NO: 198460 - DNA, 13 bp, Unknown
  misc_feature (1)..( 13): Result.006 file - promoters50/5665507
attttaagaaagc

SEQ ID NO: 198461 - DNA, 13 bp, Unknown
  misc_feature (1)..( 13): Result.006 file - promoters50/5665507
atttttgttccat

SEQ ID NO: 198462 - DNA, 13 bp, Unknown
  misc_feature (1)..( 13): Result.006 file - promoters50/5665507
gtgtttaatcaaa

SEQ ID NO: 198463 - DNA, 14 bp, Unknown
  misc_feature (1)..( 14): Result.006 file - promoters50/5665507
gtctagaaaatggt

SEQ ID NO: 198464 - DNA, 14 bp, Unknown
  misc_feature (1)..( 14): Result.006 file - promoters50/5665507
gtcgagaatacata

SEQ ID NO: 198465 - DNA, 14 bp, Unknown
  misc_feature (1)..( 14): Result.006 file - promoters50/5665507
aactataaagcaaa

SEQ ID NO: 198466 - DNA, 14 bp, Unknown
  misc_feature (1)..( 14): Result.006 file - promoters50/5665507
atcgcgaaatcgga

SEQ ID NO: 198467 - DNA, 14 bp, Unknown
  misc_feature (1)..( 14): Result.006 file - promoters50/5665507
cgcgacaataaata

SEQ ID NO: 198468 - DNA, 14 bp, Unknown
  misc_feature (1)..( 14): Result.006 file - promoters50/5665507
tcgaagaatgaatt

SEQ ID NO: 198469 - DNA, 14 bp, Unknown
  misc_feature (1)..( 14): Result.006 file - promoters50/5665507
tccgagaaaaaaca

SEQ ID NO: 198470 - DNA, 11 bp, Unknown
  misc_feature (1)..( 11): Result.006 file - promoters50/5665507
aacttgaaatt

SEQ ID NO: 198471 - DNA, 11 bp, Unknown
  misc_feature (1)..( 11): Result.006 file - promoters50/5665507
acattgaaaga

SEQ ID NO: 198472 - DNA, 11 bp, Unknown
  misc_feature (1)..( 11): Result.006 file - promoters50/5665507
aactttaaata

SEQ ID NO: 198473 - DNA, 11 bp, Unknown
  misc_feature (1)..( 11): Result.006 file - promoters50/5665507
aaacttagata

SEQ ID NO: 198474 - DNA, 11 bp, Unknown
  misc_feature (1)..( 11): Result.006 file - promoters50/5665507
ggctttaacca

SEQ ID NO: 198475 - DNA, 11 bp, Unknown
  misc_feature (1)..( 11): Result.006 file - promoters50/5665507
gcaagtaaata

SEQ ID NO: 198476 - DNA, 9 bp, Unknown
  misc_feature (1)..( 9): Result.006 file - promoters50/5665507
gctttaaaa

SEQ ID NO: 198477 - DNA, 9 bp, Unknown
  misc_feature (1)..( 9): Result.006 file - promoters50/5665507
tatttaaag

SEQ ID NO: 198478 - DNA, 9 bp, Unknown
  misc_feature (1)..( 9): Result.006 file - promoters50/5665507
actttaaat

SEQ ID NO: 198479 - DNA, 9 bp, Unknown
  misc_feature (1)..( 9): Result.006 file - promoters50/5665507
cagttaaat

SEQ ID NO: 198480 - DNA, 9 bp, Unknown
  misc_feature (1)..( 9): Result.006 file - promoters50/5665507
tatataaaa

SEQ ID NO: 198481 - DNA, 9 bp, Unknown
  misc_feature (1)..( 9): Result.006 file - promoters50/5665796
catatatta

SEQ ID NO: 198482 - DNA, 11 bp, Unknown
  misc_feature (1)..( 11): Result.006 file - promoters50/5665796
ttttatccacc

SEQ ID NO: 198483 - DNA, 11 bp, Unknown
  misc_feature (1)..( 11): Result.006 file - promoters50/5665796
cagcatccaca

SEQ ID NO: 198484 - DNA, 11 bp, Unknown
  misc_feature (1)..( 11): Result.006 file - promoters50/5665796
tagcaaccaca

SEQ ID NO: 198485 - DNA, 11 bp, Unknown
  misc_feature (1)..( 11): Result.006 file - promoters50/5665796
cagaatccatt

SEQ ID NO: 198486 - DNA, 11 bp, Unknown
  misc_feature (1)..( 11): Result.006 file - promoters50/5665796
ttgaatcctat

SEQ ID NO: 198487 - DNA, 11 bp, Unknown
  misc_feature (1)..( 11): Result.006 file - promoters50/5665796
taaaatccaat

SEQ ID NO: 198488 - DNA, 11 bp, Unknown
  misc_feature (1)..( 11): Result.006 file - promoters50/5665796
tatccaccaca

SEQ ID NO: 198489 - DNA, 11 bp, Unknown
  misc_feature (1)..( 11): Result.006 file - promoters50/5665796
tagcaaccaca

SEQ ID NO: 198490 - DNA, 11 bp, Unknown
  misc_feature (1)..( 11): Result.006 file - promoters50/5665796
cagcatccaca

SEQ ID NO: 198491 - DNA, 11 bp, Unknown
  misc_feature (1)..( 11): Result.006 file - promoters50/5665796
cagaatccatt

SEQ ID NO: 198492 - DNA, 11 bp, Unknown
  misc_feature (1)..( 11): Result.006 file - promoters50/5665796
ttgaatcctat

SEQ ID NO: 198493 - DNA, 11 bp, Unknown
  misc_feature (1)..( 11): Result.006 file - promoters50/5665796
taaaatccaat

SEQ ID NO: 198494 - DNA, 9 bp, Unknown
  misc_feature (1)..( 9): Result.006 file - promoters50/5665796
gtatcagta

SEQ ID NO: 198495 - DNA, 9 bp, Unknown
  misc_feature (1)..( 9): Result.006 file - promoters50/5665796
ttatcaggc

SEQ ID NO: 198496 - DNA, 9 bp, Unknown
  misc_feature (1)..( 9): Result.006 file - promoters50/5665796
atataagta

SEQ ID NO: 198497 - DNA, 9 bp, Unknown
  misc_feature (1)..( 9): Result.006 file - promoters50/5665796
ttaacagtt

SEQ ID NO: 198498 - DNA, 9 bp, Unknown
  misc_feature (1)..( 9): Result.006 file - promoters50/5665796
atataaacc

SEQ ID NO: 198499 - DNA, 9 bp, Unknown
  misc_feature (1)..( 9): Result.006 file - promoters50/5666614
gtgtaagta

SEQ ID NO: 198500 - DNA, 8 bp, Unknown
  misc_feature (1)..( 8): Result.006 file - promoters50/5666614
ttaaaaaa

SEQ ID NO: 198501 - DNA, 8 bp, Unknown
  misc_feature (1)..( 8): Result.006 file - promoters50/5666614
ttataaac

SEQ ID NO: 198502 - DNA, 8 bp, Unknown
  misc_feature (1)..( 8): Result.006 file - promoters50/5666614
taataaaa

SEQ ID NO: 198503 - DNA, 7 bp, Unknown
  misc_feature (1)..( 7): Result.006 file - promoters50/5666614
gtttaac

SEQ ID NO: 198504 - DNA, 7 bp, Unknown
  misc_feature (1)..( 7): Result.006 file - promoters50/5666614
gttaaac

SEQ ID NO: 198505 - DNA, 7 bp, Unknown
  misc_feature (1)..( 7): Result.006 file - promoters50/5666614
ttttaac

SEQ ID NO: 198506 - DNA, 8 bp, Unknown
  misc_feature (1)..( 8): Result.006 file - promoters50/5666614
taatttcg

SEQ ID NO: 198507 - DNA, 8 bp, Unknown
  misc_feature (1)..( 8): Result.006 file - promoters50/5666614
aaatctcg

SEQ ID NO: 198508 - DNA, 8 bp, Unknown
  misc_feature (1)..( 8): Result.006 file - promoters50/5666614
taacttcc

SEQ ID NO: 198509 - DNA, 8 bp, Unknown
  misc_feature (1)..( 8): Result.006 file - promoters50/5666614
taacttct

SEQ ID NO: 198510 - DNA, 9 bp, Unknown
  misc_feature (1)..( 9): Result.006 file - promoters50/5666614
cgttagact

SEQ ID NO: 198511 - DNA, 9 bp, Unknown
  misc_feature (1)..( 9): Result.006 file - promoters50/5666614
gtttacact

SEQ ID NO: 198512 - DNA, 9 bp, Unknown
  misc_feature (1)..( 9): Result.006 file - promoters50/5666614
gtttacaag

SEQ ID NO: 198513 - DNA, 10 bp, Unknown
  misc_feature (1)..( 10): Result.006 file - promoters50/5666614
ttgtttacaa

SEQ ID NO: 198514 - DNA, 10 bp, Unknown
  misc_feature (1)..( 10): Result.006 file - promoters50/5666614
ttgcttacct

SEQ ID NO: 198515 - DNA, 10 bp, Unknown
  misc_feature (1)..( 10): Result.006 file - promoters50/5666614
tgctttacaa

SEQ ID NO: 198516 - DNA, 8 bp, Unknown
  misc_feature (1)..( 8): Result.006 file - promoters50/5666614
ctttcttc

SEQ ID NO: 198517 - DNA, 8 bp, Unknown
  misc_feature (1)..( 8): Result.006 file - promoters50/5666614
atttcttc

SEQ ID NO: 198518 - DNA, 8 bp, Unknown
  misc_feature (1)..( 8): Result.006 file - promoters50/5667083
atttctta

SEQ ID NO: 198519 - DNA, 10 bp, Unknown
  misc_feature (1)..( 10): Result.006 file - promoters50/5667083
gaggtattgc

SEQ ID NO: 198520 - DNA, 10 bp, Unknown
  misc_feature (1)..( 10): Result.006 file - promoters50/5667083
gaggcattgc

SEQ ID NO: 198521 - DNA, 10 bp, Unknown
  misc_feature (1)..( 10): Result.006 file - promoters50/5667083
gagttatgta

SEQ ID NO: 198522 - DNA, 11 bp, Unknown
  misc_feature (1)..( 11): Result.006 file - promoters50/5667083
gctaaaatgtt

SEQ ID NO: 198523 - DNA, 11 bp, Unknown
  misc_feature (1)..( 11): Result.006 file - promoters50/5667083
tttaaattgtt

SEQ ID NO: 198524 - DNA, 11 bp, Unknown
  misc_feature (1)..( 11): Result.006 file - promoters50/5667083
gttgaaataag

SEQ ID NO: 198525 - DNA, 11 bp, Unknown
  misc_feature (1)..( 11): Result.006 file - promoters50/5667083
cccaaactgtc

SEQ ID NO: 198526 - DNA, 7 bp, Unknown
  misc_feature (1)..( 7): Result.006 file - promoters50/5667083
agaataa

SEQ ID NO: 198527 - DNA, 7 bp, Unknown
  misc_feature (1)..( 7): Result.006 file - promoters50/5667083
agagtaa

SEQ ID NO: 198528 - DNA, 7 bp, Unknown
  misc_feature (1)..( 7): Result.006 file - promoters50/5667083
agagtat

SEQ ID NO: 198529 - DNA, 8 bp, Unknown
  misc_feature (1)..( 8): Result.006 file - promoters50/5667083
aatgagaa

SEQ ID NO: 198530 - DNA, 8 bp, Unknown
  misc_feature (1)..( 8): Result.006 file - promoters50/5667083
aatgcgaa

SEQ ID NO: 198531 - DNA, 8 bp, Unknown
  misc_feature (1)..( 8): Result.006 file - promoters50/5667152
aatacgaa

SEQ ID NO: 198532 - DNA, 13 bp, Unknown
  misc_feature (1)..( 13): Result.006 file - promoters50/5667152
gttcctggtctgt

SEQ ID NO: 198533 - DNA, 13 bp, Unknown
  misc_feature (1)..( 13): Result.006 file - promoters50/5667152
attattggtttgt

SEQ ID NO: 198534 - DNA, 13 bp, Unknown
  misc_feature (1)..( 13): Result.006 file - promoters50/5667152
ttgtttgatttgt

SEQ ID NO: 198535 - DNA, 13 bp, Unknown
  misc_feature (1)..( 13): Result.006 file - promoters50/5667152
ttgcttgatgttg

SEQ ID NO: 198536 - DNA, 12 bp, Unknown
  misc_feature (1)..( 12): Result.006 file - promoters50/5667152
tttcttcttctt

SEQ ID NO: 198537 - DNA, 12 bp, Unknown
  misc_feature (1)..( 12): Result.006 file - promoters50/5667152
tttcttcatatg

SEQ ID NO: 198538 - DNA, 12 bp, Unknown
  misc_feature (1)..( 12): Result.006 file - promoters50/5667152
attcttcttctt

SEQ ID NO: 198539 - DNA, 12 bp, Unknown
  misc_feature (1)..( 12): Result.006 file - promoters50/5667426
tctcttctgcaa

SEQ ID NO: 198540 - DNA, 8 bp, Unknown
  misc_feature (1)..( 8): Result.006 file - promoters50/5667426
tgtatgtg

SEQ ID NO: 198541 - DNA, 8 bp, Unknown
  misc_feature (1)..( 8): Result.006 file - promoters50/5667426
tgtttgta

SEQ ID NO: 198542 - DNA, 8 bp, Unknown
  misc_feature (1)..( 8): Result.006 file - promoters50/5667426
agttggta

SEQ ID NO: 198543 - DNA, 8 bp, Unknown
  misc_feature (1)..( 8): Result.006 file - promoters50/5667426
aaaactaa

SEQ ID NO: 198544 - DNA, 8 bp, Unknown
  misc_feature (1)..( 8): Result.006 file - promoters50/5667426
aaaactca

SEQ ID NO: 198545 - DNA, 8 bp, Unknown
  misc_feature (1)..( 8): Result.006 file - promoters50/5667426
aaatctca

SEQ ID NO: 198546 - DNA, 7 bp, Unknown
  misc_feature (1)..( 7): Result.006 file - promoters50/5667426
gtttgtt

SEQ ID NO: 198547 - DNA, 7 bp, Unknown
  misc_feature (1)..( 7): Result.006 file - promoters50/5667426
atttgtt

SEQ ID NO: 198548 - DNA, 7 bp, Unknown
  misc_feature (1)..( 7): Result.006 file - promoters50/5667426
atttgtc

SEQ ID NO: 198549 - DNA, 8 bp, Unknown
  misc_feature (1)..( 8): Result.006 file - promoters50/5667426
tttattgt

SEQ ID NO: 198550 - DNA, 8 bp, Unknown
  misc_feature (1)..( 8): Result.006 file - promoters50/5667426
tttattca

SEQ ID NO: 198551 - DNA, 8 bp, Unknown
  misc_feature (1)..( 8): Result.006 file - promoters50/5667570
tttattat

SEQ ID NO: 198552 - DNA, 12 bp, Unknown
  misc_feature (1)..( 12): Result.006 file - promoters50/5667570
gaaataagccaa

SEQ ID NO: 198553 - DNA, 12 bp, Unknown
  misc_feature (1)..( 12): Result.006 file - promoters50/5667570
taaaaaagaaat

SEQ ID NO: 198554 - DNA, 12 bp, Unknown
  misc_feature (1)..( 12): Result.006 file - promoters50/5667570
ataataagttgt

SEQ ID NO: 198555 - DNA, 12 bp, Unknown
  misc_feature (1)..( 12): Result.006 file - promoters50/5667570
taaatagagaac

SEQ ID NO: 198556 - DNA, 12 bp, Unknown
  misc_feature (1)..( 12): Result.006 file - promoters50/5667570
gagaaaagagta

SEQ ID NO: 198557 - DNA, 12 bp, Unknown
  misc_feature (1)..( 12): Result.006 file - promoters50/5667570
ccaaaaagtaat

SEQ ID NO: 198558 - DNA, 12 bp, Unknown
  misc_feature (1)..( 12): Result.006 file - promoters50/5667570
caaaaacttaac

SEQ ID NO: 198559 - DNA, 13 bp, Unknown
  misc_feature (1)..( 13): Result.006 file - promoters50/5667570
gccaaacaaatta

SEQ ID NO: 198560 - DNA, 13 bp, Unknown
  misc_feature (1)..( 13): Result.006 file - promoters50/5667570
aaaaaagaaatga

SEQ ID NO: 198561 - DNA, 13 bp, Unknown
  misc_feature (1)..( 13): Result.006 file - promoters50/5667570
gaacaacgaatta

SEQ ID NO: 198562 - DNA, 13 bp, Unknown
  misc_feature (1)..( 13): Result.006 file - promoters50/5667570
agaaaagagtaat

SEQ ID NO: 198563 - DNA, 13 bp, Unknown
  misc_feature (1)..( 13): Result.006 file - promoters50/5667570
caaaaagtaatta

SEQ ID NO: 198564 - DNA, 13 bp, Unknown
  misc_feature (1)..( 13): Result.006 file - promoters50/5667570
caaaaacttaacc

SEQ ID NO: 198565 - DNA, 14 bp, Unknown
  misc_feature (1)..( 14): Result.006 file - promoters50/5667570
ctatatatataaac

SEQ ID NO: 198566 - DNA, 14 bp, Unknown
  misc_feature (1)..( 14): Result.006 file - promoters50/5667570
tcctatatataaac

SEQ ID NO: 198567 - DNA, 14 bp, Unknown
  misc_feature (1)..( 14): Result.006 file - promoters50/5667570
ctataaatatgaac

SEQ ID NO: 198568 - DNA, 14 bp, Unknown
  misc_feature (1)..( 14): Result.006 file - promoters50/5667570
ctctatatatatat

SEQ ID NO: 198569 - DNA, 14 bp, Unknown
  misc_feature (1)..( 14): Result.006 file - promoters50/5667570
attgtcctataaat

SEQ ID NO: 198570 - DNA, 14 bp, Unknown
  misc_feature (1)..( 14): Result.006 file - promoters50/5667588
tctagtatataaat

SEQ ID NO: 198571 - DNA, 10 bp, Unknown
  misc_feature (1)..( 10): Result.006 file - promoters50/5667588
tatataaaca

SEQ ID NO: 198572 - DNA, 10 bp, Unknown
  misc_feature (1)..( 10): Result.006 file - promoters50/5667588
tatctaagtg

SEQ ID NO: 198573 - DNA, 10 bp, Unknown
  misc_feature (1)..( 10): Result.006 file - promoters50/5667588
gttctacgtg

SEQ ID NO: 198574 - DNA, 8 bp, Unknown
  misc_feature (1)..( 8): Result.006 file - promoters50/5667588
gttatata

SEQ ID NO: 198575 - DNA, 8 bp, Unknown
  misc_feature (1)..( 8): Result.006 file - promoters50/5667588
actatata

SEQ ID NO: 198576 - DNA, 8 bp, Unknown
  misc_feature (1)..( 8): Result.006 file - promoters50/5667588
actctata

SEQ ID NO: 198577 - DNA, 8 bp, Unknown
  misc_feature (1)..( 8): Result.006 file - promoters50/5667588
gctcaaga

SEQ ID NO: 198578 - DNA, 8 bp, Unknown
  misc_feature (1)..( 8): Result.006 file - promoters50/5667588
ggtcaaga

SEQ ID NO: 198579 - DNA, 8 bp, Unknown
  misc_feature (1)..( 8): Result.006 file - promoters50/5667674
ggtgaagg

SEQ ID NO: 198580 - DNA, 8 bp, Unknown
  misc_feature (1)..( 8): Result.006 file - promoters50/5667674
acaaaagt

SEQ ID NO: 198581 - DNA, 8 bp, Unknown
  misc_feature (1)..( 8): Result.006 file - promoters50/5667674
acaaaaag

SEQ ID NO: 198582 - DNA, 8 bp, Unknown
  misc_feature (1)..( 8): Result.006 file - promoters50/5667674
acacaagt

SEQ ID NO: 198583 - DNA, 9 bp, Unknown
  misc_feature (1)..( 9): Result.006 file - promoters50/5667674
acaaaagtt

SEQ ID NO: 198584 - DNA, 9 bp, Unknown
  misc_feature (1)..( 9): Result.006 file - promoters50/5667674
caaaaagtt

SEQ ID NO: 198585 - DNA, 9 bp, Unknown
  misc_feature (1)..( 9): Result.006 file - promoters50/5667674
acacaagtc

SEQ ID NO: 198586 - DNA, 8 bp, Unknown
  misc_feature (1)..( 8): Result.006 file - promoters50/5667674
agagaaaa

SEQ ID NO: 198587 - DNA, 8 bp, Unknown
  misc_feature (1)..( 8): Result.006 file - promoters50/5667674
agataaaa

SEQ ID NO: 198588 - DNA, 8 bp, Unknown
  misc_feature (1)..( 8): Result.006 file - promoters50/5667685
acataaaa

SEQ ID NO: 198589 - DNA, 10 bp, Unknown
  misc_feature (1)..( 10): Result.006 file - promoters50/5667685
aagtaaacaa

SEQ ID NO: 198590 - DNA, 10 bp, Unknown
  misc_feature (1)..( 10): Result.006 file - promoters50/5667685
ttgtaaccaa

SEQ ID NO: 198591 - DNA, 10 bp, Unknown
  misc_feature (1)..( 10): Result.006 file - promoters50/5667689
ttggaactgc

SEQ ID NO: 198592 - DNA, 7 bp, Unknown
  misc_feature (1)..( 7): Result.006 file - promoters50/5667689
taaaacc

SEQ ID NO: 198593 - DNA, 7 bp, Unknown
  misc_feature (1)..( 7): Result.006 file - promoters50/5667689
taaaaca

SEQ ID NO: 198594 - DNA, 7 bp, Unknown
  misc_feature (1)..( 7): Result.006 file - promoters50/5667705
taaaacc

SEQ ID NO: 198595 - DNA, 10 bp, Unknown
  misc_feature (1)..( 10): Result.006 file - promoters50/5667705
gatagaaagt

SEQ ID NO: 198596 - DNA, 10 bp, Unknown
  misc_feature (1)..( 10): Result.006 file - promoters50/5667705
aatagaatca

SEQ ID NO: 198597 - DNA, 10 bp, Unknown
  misc_feature (1)..( 10): Result.006 file - promoters50/5667705
aataaaatca

SEQ ID NO: 198598 - DNA, 9 bp, Unknown
  misc_feature (1)..( 9): Result.006 file - promoters50/5667705
tttgttccg

SEQ ID NO: 198599 - DNA, 9 bp, Unknown
  misc_feature (1)..( 9): Result.006 file - promoters50/5667705
ttttttccg

SEQ ID NO: 198600 - DNA, 9 bp, Unknown
  misc_feature (1)..( 9): Result.006 file - promoters50/5667705
ttcgttttc

SEQ ID NO: 198601 - DNA, 14 bp, Unknown
  misc_feature (1)..( 14): Result.006 file - promoters50/5667705
cgtttagatttttg

SEQ ID NO: 198602 - DNA, 14 bp, Unknown
  misc_feature (1)..( 14): Result.006 file - promoters50/5667705
cgtttagttttttg

SEQ ID NO: 198603 - DNA, 14 bp, Unknown
  misc_feature (1)..( 14): Result.006 file - promoters50/5667705
tcttgagatttgag

SEQ ID NO: 198604 - DNA, 8 bp, Unknown
  misc_feature (1)..( 8): Result.006 file - promoters50/5667705
gttggaag

SEQ ID NO: 198605 - DNA, 8 bp, Unknown
  misc_feature (1)..( 8): Result.006 file - promoters50/5667705
attgaaag

SEQ ID NO: 198606 - DNA, 8 bp, Unknown
  misc_feature (1)..( 8): Result.006 file - promoters50/5667720
attcaaag

SEQ ID NO: 198607 - DNA, 14 bp, Unknown
  misc_feature (1)..( 14): Result.006 file - promoters50/5667720
ttataaccaaaaat

SEQ ID NO: 198608 - DNA, 14 bp, Unknown
  misc_feature (1)..( 14): Result.006 file - promoters50/5667720
atttaaccaaaata

SEQ ID NO: 198609 - DNA, 14 bp, Unknown
  misc_feature (1)..( 14): Result.006 file - promoters50/5667720
aataaactaaacac

SEQ ID NO: 198610 - DNA, 15 bp, Unknown
  misc_feature (1)..( 15): Result.006 file - promoters50/5667720
ctataacccaaaatt

SEQ ID NO: 198611 - DNA, 15 bp, Unknown
  misc_feature (1)..( 15): Result.006 file - promoters50/5667720
ttttagccaatcagt

SEQ ID NO: 198612 - DNA, 15 bp, Unknown
  misc_feature (1)..( 15): Result.006 file - promoters50/5667720
ttttagttatatgac

SEQ ID NO: 198613 - DNA, 15 bp, Unknown
  misc_feature (1)..( 15): Result.006 file - promoters50/5667720
ataaatcgtaaaatt

SEQ ID NO: 198614 - DNA, 20 bp, Unknown
  misc_feature (1)..( 20): Result.006 file - promoters50/5667720
tataaccaaaaataatagta

SEQ ID NO: 198615 - DNA, 20 bp, Unknown
  misc_feature (1)..( 20): Result.006 file - promoters50/5667720
atttaaccaaaataaaataa

SEQ ID NO: 198616 - DNA, 20 bp, Unknown
  misc_feature (1)..( 20): Result.006 file - promoters50/5667720
tataacccaaaattgaccct

SEQ ID NO: 198617 - DNA, 20 bp, Unknown
  misc_feature (1)..( 20): Result.006 file - promoters50/5667720
tgagtttcgaaataaatgac

SEQ ID NO: 198618 - DNA, 20 bp, Unknown
  misc_feature (1)..( 20): Result.006 file - promoters50/5667720
ctctatgaaaaataaactaa

SEQ ID NO: 198619 - DNA, 19 bp, Unknown
  misc_feature (1)..( 19): Result.006 file - promoters50/5667720
agtaacaaaaacaaaagga

SEQ ID NO: 198620 - DNA, 13 bp, Unknown
  misc_feature (1)..( 13): Result.006 file - promoters50/5667720
caaaacaatttta

SEQ ID NO: 198621 - DNA, 16 bp, Unknown
  misc_feature (1)..( 16): Result.006 file - promoters50/5667720
ccaaaaaagaaatatg

SEQ ID NO: 198622 - DNA, 16 bp, Unknown
  misc_feature (1)..( 16): Result.006 file - promoters50/5667720
tttaataagaaataat

SEQ ID NO: 198623 - DNA, 16 bp, Unknown
  misc_feature (1)..( 16): Result.006 file - promoters50/5667720
taaccaaaaaaattaa

SEQ ID NO: 198624 - DNA, 16 bp, Unknown
  misc_feature (1)..( 16): Result.006 file - promoters50/5667720
gtatataagatatatg

SEQ ID NO: 198625 - DNA, 16 bp, Unknown
  misc_feature (1)..( 16): Result.006 file - promoters50/5667720
gtttaaaacaaaggtc

SEQ ID NO: 198626 - DNA, 16 bp, Unknown
  misc_feature (1)..( 16): Result.006 file - promoters50/5667720
tttactaaaaaagaag

SEQ ID NO: 198627 - DNA, 16 bp, Unknown
  misc_feature (1)..( 16): Result.006 file - promoters50/5667720
attaataaaacattta

SEQ ID NO: 198628 - DNA, 12 bp, Unknown
  misc_feature (1)..( 12): Result.006 file - promoters50/5667720
aaaaaaacaaat

SEQ ID NO: 198629 - DNA, 12 bp, Unknown
  misc_feature (1)..( 12): Result.006 file - promoters50/5667720
tgtaaaacaaga

SEQ ID NO: 198630 - DNA, 12 bp, Unknown
  misc_feature (1)..( 12): Result.006 file - promoters50/5667720
attggaacaaat

SEQ ID NO: 198631 - DNA, 12 bp, Unknown
  misc_feature (1)..( 12): Result.006 file - promoters50/5667720
ttaaaaacttaa

SEQ ID NO: 198632 - DNA, 12 bp, Unknown
  misc_feature (1)..( 12): Result.006 file - promoters50/5667720
aagattacaaag

SEQ ID NO: 198633 - DNA, 12 bp, Unknown
  misc_feature (1)..( 12): Result.006 file - promoters50/5667720
ttaaaaaacttt

SEQ ID NO: 198634 - DNA, 12 bp, Unknown
  misc_feature (1)..( 12): Result.006 file - promoters50/5667720
aataaatcttta

SEQ ID NO: 198635 - DNA, 17 bp, Unknown
  misc_feature (1)..( 17): Result.006 file - promoters50/5667720
taccaaaaaaggaagaa

SEQ ID NO: 198636 - DNA, 17 bp, Unknown
  misc_feature (1)..( 17): Result.006 file - promoters50/5667720
aagcaaacaagaaaacg

SEQ ID NO: 198637 - DNA, 17 bp, Unknown
  misc_feature (1)..( 17): Result.006 file - promoters50/5667720
ttttaaaaaactttatc

SEQ ID NO: 198638 - DNA, 17 bp, Unknown
  misc_feature (1)..( 17): Result.006 file - promoters50/5667720
ttacaaagagatagaga

SEQ ID NO: 198639 - DNA, 17 bp, Unknown
  misc_feature (1)..( 17): Result.006 file - promoters50/5667720
gtataataaatctttat

SEQ ID NO: 198640 - DNA, 17 bp, Unknown
  misc_feature (1)..( 17): Result.006 file - promoters50/5667720
tattaaaaacttaatca

SEQ ID NO: 198641 - DNA, 14 bp, Unknown
  misc_feature (1)..( 14): Result.006 file - promoters50/5667720
aaaaagtttttatt

SEQ ID NO: 198642 - DNA, 14 bp, Unknown
  misc_feature (1)..( 14): Result.006 file - promoters50/5667720
ccaatatttttacg

SEQ ID NO: 198643 - DNA, 14 bp, Unknown
  misc_feature (1)..( 14): Result.006 file - promoters50/5667720
actgatttttcatt

SEQ ID NO: 198644 - DNA, 14 bp, Unknown
  misc_feature (1)..( 14): Result.006 file - promoters50/5667720
gacagctttttata

SEQ ID NO: 198645 - DNA, 14 bp, Unknown
  misc_feature (1)..( 14): Result.006 file - promoters50/5667720
aaaaactttttacg

SEQ ID NO: 198646 - DNA, 14 bp, Unknown
  misc_feature (1)..( 14): Result.006 file - promoters50/5667720
caaatcctttcatt

SEQ ID NO: 198647 - DNA, 14 bp, Unknown
  misc_feature (1)..( 14): Result.006 file - promoters50/5667720
atgtaatgtatgta

SEQ ID NO: 198648 - DNA, 14 bp, Unknown
  misc_feature (1)..( 14): Result.006 file - promoters50/5667720
aacaaatttattaa

SEQ ID NO: 198649 - DNA, 14 bp, Unknown
  misc_feature (1)..( 14): Result.006 file - promoters50/5667720
aacaaatttaatag

SEQ ID NO: 198650 - DNA, 14 bp, Unknown
  misc_feature (1)..( 14): Result.006 file - promoters50/5667720
atgttattaaataa

SEQ ID NO: 198651 - DNA, 14 bp, Unknown
  misc_feature (1)..( 14): Result.006 file - promoters50/5667720
atcaaaaaaaggaa

SEQ ID NO: 198652 - DNA, 14 bp, Unknown
  misc_feature (1)..( 14): Result.006 file - promoters50/5667720
atttctttttttaa

SEQ ID NO: 198653 - DNA, 8 bp, Unknown
  misc_feature (1)..( 8): Result.006 file - promoters50/5667720
gttttttt

SEQ ID NO: 198654 - DNA, 8 bp, Unknown
  misc_feature (1)..( 8): Result.006 file - promoters50/5667720
atttgttt

SEQ ID NO: 198655 - DNA, 8 bp, Unknown
  misc_feature (1)..( 8): Result.006 file - promoters50/5667720
tgttattt

SEQ ID NO: 198656 - DNA, 8 bp, Unknown
  misc_feature (1)..( 8): Result.006 file - promoters50/5667720
cttttttt

SEQ ID NO: 198657 - DNA, 8 bp, Unknown
  misc_feature (1)..( 8): Result.006 file - promoters50/5667720
agtttttc

SEQ ID NO: 198658 - DNA, 8 bp, Unknown
  misc_feature (1)..( 8): Result.006 file - promoters50/5667720
ccttttta

SEQ ID NO: 198659 - DNA, 8 bp, Unknown
  misc_feature (1)..( 8): Result.006 file - promoters50/5667720
aatcatat

SEQ ID NO: 198660 - DNA, 8 bp, Unknown
  misc_feature (1)..( 8): Result.006 file - promoters50/5667720
aatgataa

SEQ ID NO: 198661 - DNA, 8 bp, Unknown
  misc_feature (1)..( 8): Result.006 file - promoters50/5667720
aatcatgc

SEQ ID NO: 198662 - DNA, 8 bp, Unknown
  misc_feature (1)..( 8): Result.006 file - promoters50/5667720
aatgatgg

SEQ ID NO: 198663 - DNA, 8 bp, Unknown
  misc_feature (1)..( 8): Result.006 file - promoters50/5667720
tatgttaa

SEQ ID NO: 198664 - DNA, 8 bp, Unknown
  misc_feature (1)..( 8): Result.006 file - promoters50/5667720
aataagtt

SEQ ID NO: 198665 - DNA, 11 bp, Unknown
  misc_feature (1)..( 11): Result.006 file - promoters50/5667720
ggaaactttat

SEQ ID NO: 198666 - DNA, 11 bp, Unknown
  misc_feature (1)..( 11): Result.006 file - promoters50/5667720
tgaaacttaaa

SEQ ID NO: 198667 - DNA, 11 bp, Unknown
  misc_feature (1)..( 11): Result.006 file - promoters50/5667720
ggaaactgaca

SEQ ID NO: 198668 - DNA, 11 bp, Unknown
  misc_feature (1)..( 11): Result.006 file - promoters50/5667720
gtaaaattttt

SEQ ID NO: 198669 - DNA, 11 bp, Unknown
  misc_feature (1)..( 11): Result.006 file - promoters50/5667720
ccaaaattgac

SEQ ID NO: 198670 - DNA, 11 bp, Unknown
  misc_feature (1)..( 11): Result.006 file - promoters50/5667733
ttttaatagac

SEQ ID NO: 198671 - DNA, 8 bp, Unknown
  misc_feature (1)..( 8): Result.006 file - promoters50/5667733
ttttatta

SEQ ID NO: 198672 - DNA, 8 bp, Unknown
  misc_feature (1)..( 8): Result.006 file - promoters50/5667733
tattatta

SEQ ID NO: 198673 - DNA, 8 bp, Unknown
  misc_feature (1)..( 8): Result.006 file - promoters50/5667733
tatcattt

SEQ ID NO: 198674 - DNA, 7 bp, Unknown
  misc_feature (1)..( 7): Result.006 file - promoters50/5667733
atttttt

SEQ ID NO: 198675 - DNA, 7 bp, Unknown
  misc_feature (1)..( 7): Result.006 file - promoters50/5667733
ctttttt

SEQ ID NO: 198676 - DNA, 7 bp, Unknown
  misc_feature (1)..( 7): Result.006 file - promoters50/5667737
ctttttg

SEQ ID NO: 198677 - DNA, 9 bp, Unknown
  misc_feature (1)..( 9): Result.006 file - promoters50/5667737
tctacaaca

SEQ ID NO: 198678 - DNA, 9 bp, Unknown
  misc_feature (1)..( 9): Result.006 file - promoters50/5667737
actacaaag

SEQ ID NO: 198679 - DNA, 9 bp, Unknown
  misc_feature (1)..( 9): Result.006 file - promoters50/5667737
tctaaaaag

SEQ ID NO: 198680 - DNA, 9 bp, Unknown
  misc_feature (1)..( 9): Result.006 file - promoters50/5667737
tctagaaat

SEQ ID NO: 198681 - DNA, 9 bp, Unknown
  misc_feature (1)..( 9): Result.006 file - promoters50/5667737
tttaataag

SEQ ID NO: 198682 - DNA, 9 bp, Unknown
  misc_feature (1)..( 9): Result.006 file - promoters50/5667737
cataataaa

SEQ ID NO: 198683 - DNA, 13 bp, Unknown
  misc_feature (1)..( 13): Result.006 file - promoters50/5667737
aacaaaaaccaaa

SEQ ID NO: 198684 - DNA, 13 bp, Unknown
  misc_feature (1)..( 13): Result.006 file - promoters50/5667737
tacaaagaccaaa

SEQ ID NO: 198685 - DNA, 13 bp, Unknown
  misc_feature (1)..( 13): Result.006 file - promoters50/5667737
tctaaaaagtatt

SEQ ID NO: 198686 - DNA, 13 bp, Unknown
  misc_feature (1)..( 13): Result.006 file - promoters50/5667737
tctagaaattcta

SEQ ID NO: 198687 - DNA, 13 bp, Unknown
  misc_feature (1)..( 13): Result.006 file - promoters50/5667737
tttaataagagtg

SEQ ID NO: 198688 - DNA, 13 bp, Unknown
  misc_feature (1)..( 13): Result.006 file - promoters50/5667741
cataataaattat

SEQ ID NO: 198689 - DNA, 10 bp, Unknown
  misc_feature (1)..( 10): Result.006 file - promoters50/5667741
gatagatata

SEQ ID NO: 198690 - DNA, 10 bp, Unknown
  misc_feature (1)..( 10): Result.006 file - promoters50/5667741
tatatatact

SEQ ID NO: 198691 - DNA, 10 bp, Unknown
  misc_feature (1)..( 10): Result.006 file - promoters50/5667741
tatgtattgt

SEQ ID NO: 198692 - DNA, 11 bp, Unknown
  misc_feature (1)..( 11): Result.006 file - promoters50/5667741
tatttactact

SEQ ID NO: 198693 - DNA, 11 bp, Unknown
  misc_feature (1)..( 11): Result.006 file - promoters50/5667741
aatacactaaa

SEQ ID NO: 198694 - DNA, 11 bp, Unknown
  misc_feature (1)..( 11): Result.006 file - promoters50/5667766
aatttattact

SEQ ID NO: 198695 - DNA, 7 bp, Unknown
  misc_feature (1)..( 7): Result.006 file - promoters50/5667766
atattcg

SEQ ID NO: 198696 - DNA, 7 bp, Unknown
  misc_feature (1)..( 7): Result.006 file - promoters50/5667766
atattca

SEQ ID NO: 198697 - DNA, 7 bp, Unknown
  misc_feature (1)..( 7): Result.006 file - promoters50/5667766
atagtca

SEQ ID NO: 198698 - DNA, 10 bp, Unknown
  misc_feature (1)..( 10): Result.006 file - promoters50/5667766
atttttgttg

SEQ ID NO: 198699 - DNA, 10 bp, Unknown
  misc_feature (1)..( 10): Result.006 file - promoters50/5667766
attgttgttt

SEQ ID NO: 198700 - DNA, 10 bp, Unknown
  misc_feature (1)..( 10): Result.006 file - promoters50/5667766
aggtttgttg

SEQ ID NO: 198701 - DNA, 14 bp, Unknown
  misc_feature (1)..( 14): Result.006 file - promoters50/5667766
cattcggatactgg

SEQ ID NO: 198702 - DNA, 14 bp, Unknown
  misc_feature (1)..( 14): Result.006 file - promoters50/5667766
catttggacttggt

SEQ ID NO: 198703 - DNA, 14 bp, Unknown
  misc_feature (1)..( 14): Result.006 file - promoters50/5667770
gtgtcggaaactgg

SEQ ID NO: 198704 - DNA, 10 bp, Unknown
  misc_feature (1)..( 10): Result.006 file - promoters50/5667770
aaatttattt

SEQ ID NO: 198705 - DNA, 10 bp, Unknown
  misc_feature (1)..( 10): Result.006 file - promoters50/5667770
aaatatattt

SEQ ID NO: 198706 - DNA, 10 bp, Unknown
  misc_feature (1)..( 10): Result.006 file - promoters50/5667785
aaacttaata

SEQ ID NO: 198707 - DNA, 8 bp, Unknown
  misc_feature (1)..( 8): Result.006 file - promoters50/5667785
gttcgtat

SEQ ID NO: 198708 - DNA, 8 bp, Unknown
  misc_feature (1)..( 8): Result.006 file - promoters50/5667785
gttagtat

SEQ ID NO: 198709 - DNA, 8 bp, Unknown
  misc_feature (1)..( 8): Result.006 file - promoters50/5667785
cttcgtaa

SEQ ID NO: 198710 - DNA, 8 bp, Unknown
  misc_feature (1)..( 8): Result.006 file - promoters50/5667812
gttcctaa

SEQ ID NO: 198711 - DNA, 14 bp, Unknown
  misc_feature (1)..( 14): Result.006 file - promoters50/5667812
aactggaagtatgt

SEQ ID NO: 198712 - DNA, 14 bp, Unknown
  misc_feature (1)..( 14): Result.006 file - promoters50/5667812
aaatagaaatatgt

SEQ ID NO: 198713 - DNA, 14 bp, Unknown
  misc_feature (1)..( 14): Result.006 file - promoters50/5667812
atatataaaaattt

SEQ ID NO: 198714 - DNA, 14 bp, Unknown
  misc_feature (1)..( 14): Result.006 file - promoters50/5667812
gagaagaaatttat

SEQ ID NO: 198715 - DNA, 14 bp, Unknown
  misc_feature (1)..( 14): Result.006 file - promoters50/5667812
aaaaagaaatgtag

SEQ ID NO: 198716 - DNA, 14 bp, Unknown
  misc_feature (1)..( 14): Result.006 file - promoters50/5667812
aattttatatatgt

SEQ ID NO: 198717 - DNA, 11 bp, Unknown
  misc_feature (1)..( 11): Result.006 file - promoters50/5667812
tatataaaaat

SEQ ID NO: 198718 - DNA, 11 bp, Unknown
  misc_feature (1)..( 11): Result.006 file - promoters50/5667812
aaaataaaaaa

SEQ ID NO: 198719 - DNA, 11 bp, Unknown
  misc_feature (1)..( 11): Result.006 file - promoters50/5667812
tctataaaaag

SEQ ID NO: 198720 - DNA, 11 bp, Unknown
  misc_feature (1)..( 11): Result.006 file - promoters50/5667812
ggtattaaaat

SEQ ID NO: 198721 - DNA, 11 bp, Unknown
  misc_feature (1)..( 11): Result.006 file - promoters50/5667812
aaaagaaaaag

SEQ ID NO: 198722 - DNA, 12 bp, Unknown
  misc_feature (1)..( 12): Result.006 file - promoters50/5667814
gggatccataac

SEQ ID NO: 198723 - DNA, 12 bp, Unknown
  misc_feature (1)..( 12): Result.006 file - promoters50/5667814
caaatcgaagaa

SEQ ID NO: 198724 - DNA, 12 bp, Unknown
  misc_feature (1)..( 12): Result.006 file - promoters50/5667814
aaaattgaaact

SEQ ID NO: 198725 - DNA, 12 bp, Unknown
  misc_feature (1)..( 12): Result.006 file - promoters50/5667814
tattttgatact

SEQ ID NO: 198726 - DNA, 12 bp, Unknown
  misc_feature (1)..( 12): Result.006 file - promoters50/5667814
tccgttgataaa

SEQ ID NO: 198727 - DNA, 12 bp, Unknown
  misc_feature (1)..( 12): Result.006 file - promoters50/5667814
tattttaatata

SEQ ID NO: 198728 - DNA, 12 bp, Unknown
  misc_feature (1)..( 12): Result.006 file - promoters50/5667822
cgacttgaaaac

SEQ ID NO: 198729 - DNA, 13 bp, Unknown
  misc_feature (1)..( 13): Result.006 file - promoters50/5667822
aaaattgaatttg

SEQ ID NO: 198730 - DNA, 13 bp, Unknown
  misc_feature (1)..( 13): Result.006 file - promoters50/5667822
tatattgaagttt

SEQ ID NO: 198731 - DNA, 13 bp, Unknown
  misc_feature (1)..( 13): Result.006 file - promoters50/5667822
aaaactgaaatca

SEQ ID NO: 198732 - DNA, 13 bp, Unknown
  misc_feature (1)..( 13): Result.006 file - promoters50/5667822
tttgttgactttg

SEQ ID NO: 198733 - DNA, 13 bp, Unknown
  misc_feature (1)..( 13): Result.006 file - promoters50/5667822
ctacttggcttgc

SEQ ID NO: 198734 - DNA, 13 bp, Unknown
  misc_feature (1)..( 13): Result.006 file - promoters50/5667822
gttactaaaagtt

SEQ ID NO: 198735 - DNA, 8 bp, Unknown
  misc_feature (1)..( 8): Result.006 file - promoters50/5667822
tataaaaa

SEQ ID NO: 198736 - DNA, 8 bp, Unknown
  misc_feature (1)..( 8): Result.006 file - promoters50/5667822
tatcaaat

SEQ ID NO: 198737 - DNA, 8 bp, Unknown
  misc_feature (1)..( 8): Result.006 file - promoters50/5667822
cataaaat

SEQ ID NO: 198738 - DNA, 8 bp, Unknown
  misc_feature (1)..( 8): Result.006 file - promoters50/5667822
gataaaat

SEQ ID NO: 198739 - DNA, 9 bp, Unknown
  misc_feature (1)..( 9): Result.006 file - promoters50/5667822
gataacaaa

SEQ ID NO: 198740 - DNA, 9 bp, Unknown
  misc_feature (1)..( 9): Result.006 file - promoters50/5667822
tatcaatgg

SEQ ID NO: 198741 - DNA, 15 bp, Unknown
  misc_feature (1)..( 15): Result.006 file - promoters50/5667822
agtatacaaaagctt

SEQ ID NO: 198742 - DNA, 15 bp, Unknown
  misc_feature (1)..( 15): Result.006 file - promoters50/5667822
tttataaaaaattga

SEQ ID NO: 198743 - DNA, 15 bp, Unknown
  misc_feature (1)..( 15): Result.006 file - promoters50/5667822
ttggaaaaaaataac

SEQ ID NO: 198744 - DNA, 15 bp, Unknown
  misc_feature (1)..( 15): Result.006 file - promoters50/5667822
ttcttaaaaaatcaa

SEQ ID NO: 198745 - DNA, 15 bp, Unknown
  misc_feature (1)..( 15): Result.006 file - promoters50/5667822
tttgtaataataact

SEQ ID NO: 198746 - DNA, 16 bp, Unknown
  misc_feature (1)..( 16): Result.006 file - promoters50/5667822
cttacaaagaaataac

SEQ ID NO: 198747 - DNA, 16 bp, Unknown
  misc_feature (1)..( 16): Result.006 file - promoters50/5667822
atcggaaagaagaaaa

SEQ ID NO: 198748 - DNA, 10 bp, Unknown
  misc_feature (1)..( 10): Result.006 file - promoters50/5667822
aaaaaccgtt

SEQ ID NO: 198749 - DNA, 10 bp, Unknown
  misc_feature (1)..( 10): Result.006 file - promoters50/5667822
aaaaacatta

SEQ ID NO: 198750 - DNA, 10 bp, Unknown
  misc_feature (1)..( 10): Result.006 file - promoters50/5667822
aaaaaaaaaa

SEQ ID NO: 198751 - DNA, 10 bp, Unknown
  misc_feature (1)..( 10): Result.006 file - promoters50/5667822
aaaaaaataa

SEQ ID NO: 198752 - DNA, 11 bp, Unknown
  misc_feature (1)..( 11): Result.006 file - promoters50/5667822
aaagaaataac

SEQ ID NO: 198753 - DNA, 11 bp, Unknown
  misc_feature (1)..( 11): Result.006 file - promoters50/5667849
aaagaagaaaa

SEQ ID NO: 198754 - DNA, 16 bp, Unknown
  misc_feature (1)..( 16): Result.006 file - promoters50/5667849
caacattttaaaatat

SEQ ID NO: 198755 - DNA, 16 bp, Unknown
  misc_feature (1)..( 16): Result.006 file - promoters50/5667849
caagattataaatcat

SEQ ID NO: 198756 - DNA, 16 bp, Unknown
  misc_feature (1)..( 16): Result.006 file - promoters50/5667849
cttctctatgaatcat

SEQ ID NO: 198757 - DNA, 16 bp, Unknown
  misc_feature (1)..( 16): Result.006 file - promoters50/5667849
tttgtctttgaacttc

SEQ ID NO: 198758 - DNA, 16 bp, Unknown
  misc_feature (1)..( 16): Result.006 file - promoters50/5667849
agattaaatgaatagt

SEQ ID NO: 198759 - DNA, 16 bp, Unknown
  misc_feature (1)..( 16): Result.006 file - promoters50/5667849
tgcttctttggattaa

SEQ ID NO: 198760 - DNA, 12 bp, Unknown
  misc_feature (1)..( 12): Result.006 file - promoters50/5667849
atgatgcatcca

SEQ ID NO: 198761 - DNA, 12 bp, Unknown
  misc_feature (1)..( 12): Result.006 file - promoters50/5667849
tctatgaatcat

SEQ ID NO: 198762 - DNA, 12 bp, Unknown
  misc_feature (1)..( 12): Result.006 file - promoters50/5667849
attataaatcat

SEQ ID NO: 198763 - DNA, 12 bp, Unknown
  misc_feature (1)..( 12): Result.006 file - promoters50/5667849
tctttgaacttc

SEQ ID NO: 198764 - DNA, 12 bp, Unknown
  misc_feature (1)..( 12): Result.006 file - promoters50/5667849
taaatgaatagt

SEQ ID NO: 198765 - DNA, 12 bp, Unknown
  misc_feature (1)..( 12): Result.006 file - promoters50/5668051
tctttggattaa

SEQ ID NO: 198766 - DNA, 8 bp, Unknown
  misc_feature (1)..( 8): Result.006 file - promoters50/5668051
taccttat

SEQ ID NO: 198767 - DNA, 8 bp, Unknown
  misc_feature (1)..( 8): Result.006 file - promoters50/5668051
aaccatat

SEQ ID NO: 198768 - DNA, 8 bp, Unknown
  misc_feature (1)..( 8): Result.006 file - promoters50/5668051
aacaataa

SEQ ID NO: 198769 - DNA, 8 bp, Unknown
  misc_feature (1)..( 8): Result.006 file - promoters50/5668065
aacaatgg

SEQ ID NO: 198770 - DNA, 15 bp, Unknown
  misc_feature (1)..( 15): Result.006 file - promoters50/5668065
cattttgggaaaaag

SEQ ID NO: 198771 - DNA, 15 bp, Unknown
  misc_feature (1)..( 15): Result.006 file - promoters50/5668065
aattctggtagaggt

SEQ ID NO: 198772 - DNA, 15 bp, Unknown
  misc_feature (1)..( 15): Result.006 file - promoters50/5668065
catcttggtccatat

SEQ ID NO: 198773 - DNA, 15 bp, Unknown
  misc_feature (1)..( 15): Result.006 file - promoters50/5668065
cattttattcaatta

SEQ ID NO: 198774 - DNA, 15 bp, Unknown
  misc_feature (1)..( 15): Result.006 file - promoters50/5668065
aatcctgcacaagtc

SEQ ID NO: 198775 - DNA, 15 bp, Unknown
  misc_feature (1)..( 15): Result.006 file - promoters50/5668065
tcttttgatttgatt

SEQ ID NO: 198776 - DNA, 10 bp, Unknown
  misc_feature (1)..( 10): Result.006 file - promoters50/5668065
ttcaaagtcg

SEQ ID NO: 198777 - DNA, 10 bp, Unknown
  misc_feature (1)..( 10): Result.006 file - promoters50/5668065
ttcaaaaaaa

SEQ ID NO: 198778 - DNA, 11 bp, Unknown
  misc_feature (1)..( 11): Result.006 file - promoters50/5668065
ttcgaaacaaa

SEQ ID NO: 198779 - DNA, 11 bp, Unknown
  misc_feature (1)..( 11): Result.006 file - promoters50/5668065
ttccaaaatat

SEQ ID NO: 198780 - DNA, 11 bp, Unknown
  misc_feature (1)..( 11): Result.006 file - promoters50/5668065
gatgaaacaga

SEQ ID NO: 198781 - DNA, 11 bp, Unknown
  misc_feature (1)..( 11): Result.006 file - promoters50/5668069
tacgaaacgtc

SEQ ID NO: 198782 - DNA, 7 bp, Unknown
  misc_feature (1)..( 7): Result.006 file - promoters50/5668069
ttttata

SEQ ID NO: 198783 - DNA, 7 bp, Unknown
  misc_feature (1)..( 7): Result.006 file - promoters50/5668069
ttttatt

SEQ ID NO: 198784 - DNA, 7 bp, Unknown
  misc_feature (1)..( 7): Result.006 file - promoters50/5668085
tttcatt

SEQ ID NO: 198785 - DNA, 13 bp, Unknown
  misc_feature (1)..( 13): Result.006 file - promoters50/5668085
ctcttcttctttt

SEQ ID NO: 198786 - DNA, 13 bp, Unknown
  misc_feature (1)..( 13): Result.006 file - promoters50/5668085
ctcgtcttccctt

SEQ ID NO: 198787 - DNA, 13 bp, Unknown
  misc_feature (1)..( 13): Result.006 file - promoters50/5668085
ttgatcttccctt

SEQ ID NO: 198788 - DNA, 7 bp, Unknown
  misc_feature (1)..( 7): Result.006 file - promoters50/5668085
gcggaat

SEQ ID NO: 198789 - DNA, 7 bp, Unknown
  misc_feature (1)..( 7): Result.006 file - promoters50/5668085
gcggaaa

SEQ ID NO: 198790 - DNA, 7 bp, Unknown
  misc_feature (1)..( 7): Result.006 file - promoters50/5668085
tcggaaa

SEQ ID NO: 198791 - DNA, 7 bp, Unknown
  misc_feature (1)..( 7): Result.006 file - promoters50/5668085
ttccttg

SEQ ID NO: 198792 - DNA, 7 bp, Unknown
  misc_feature (1)..( 7): Result.006 file - promoters50/5668085
ctccttg

SEQ ID NO: 198793 - DNA, 7 bp, Unknown
  misc_feature (1)..( 7): Result.006 file - promoters50/5668101
ctcgttg

SEQ ID NO: 198794 - DNA, 12 bp, Unknown
  misc_feature (1)..( 12): Result.006 file - promoters50/5668101
acttatttgacc

SEQ ID NO: 198795 - DNA, 12 bp, Unknown
  misc_feature (1)..( 12): Result.006 file - promoters50/5668101
agttatttatgt

SEQ ID NO: 198796 - DNA, 12 bp, Unknown
  misc_feature (1)..( 12): Result.006 file - promoters50/5668101
tgttattgatta

SEQ ID NO: 198797 - DNA, 12 bp, Unknown
  misc_feature (1)..( 12): Result.006 file - promoters50/5668101
tgtttttgctta

SEQ ID NO: 198798 - DNA, 10 bp, Unknown
  misc_feature (1)..( 10): Result.006 file - promoters50/5668101
ggacacgtgt

SEQ ID NO: 198799 - DNA, 10 bp, Unknown
  misc_feature (1)..( 10): Result.006 file - promoters50/5668101
ggacccgtga

SEQ ID NO: 198800 - DNA, 10 bp, Unknown
  misc_feature (1)..( 10): Result.006 file - promoters50/5668101
ccaccggtga

SEQ ID NO: 198801 - DNA, 8 bp, Unknown
  misc_feature (1)..( 8): Result.006 file - promoters50/5668101
tttatgtt

SEQ ID NO: 198802 - DNA, 8 bp, Unknown
  misc_feature (1)..( 8): Result.006 file - promoters50/5668101
tttatgtt

SEQ ID NO: 198803 - DNA, 8 bp, Unknown
  misc_feature (1)..( 8): Result.006 file - promoters50/5668101
attatgtt

SEQ ID NO: 198804 - DNA, 7 bp, Unknown
  misc_feature (1)..( 7): Result.006 file - promoters50/5668101
ataagtt

SEQ ID NO: 198805 - DNA, 7 bp, Unknown
  misc_feature (1)..( 7): Result.006 file - promoters50/5668101
ttaagtt

SEQ ID NO: 198806 - DNA, 7 bp, Unknown
  misc_feature (1)..( 7): Result.006 file - promoters50/5668101
ttatgtt

SEQ ID NO: 198807 - DNA, 12 bp, Unknown
  misc_feature (1)..( 12): Result.006 file - promoters50/5668101
cttttaactaca

SEQ ID NO: 198808 - DNA, 12 bp, Unknown
  misc_feature (1)..( 12): Result.006 file - promoters50/5668101
cttgtaaccaca

SEQ ID NO: 198809 - DNA, 12 bp, Unknown
  misc_feature (1)..( 12): Result.006 file - promoters50/5668111
catgttaccaat

SEQ ID NO: 198810 - DNA, 10 bp, Unknown
  misc_feature (1)..( 10): Result.006 file - promoters50/5668111
aattaaatat

SEQ ID NO: 198811 - DNA, 10 bp, Unknown
  misc_feature (1)..( 10): Result.006 file - promoters50/5668111
aattaagagc

SEQ ID NO: 198812 - DNA, 10 bp, Unknown
  misc_feature (1)..( 10): Result.006 file - promoters50/5668111
aattatataa

SEQ ID NO: 198813 - DNA, 10 bp, Unknown
  misc_feature (1)..( 10): Result.006 file - promoters50/5668111
aattatcaag

SEQ ID NO: 198814 - DNA, 10 bp, Unknown
  misc_feature (1)..( 10): Result.006 file - promoters50/5668111
aattattatg

SEQ ID NO: 198815 - DNA, 10 bp, Unknown
  misc_feature (1)..( 10): Result.006 file - promoters50/5668111
ttgtatataa

SEQ ID NO: 198816 - DNA, 11 bp, Unknown
  misc_feature (1)..( 11): Result.006 file - promoters50/5668111
ctcttaaaaac

SEQ ID NO: 198817 - DNA, 11 bp, Unknown
  misc_feature (1)..( 11): Result.006 file - promoters50/5668111
ctgataaaaag

SEQ ID NO: 198818 - DNA, 11 bp, Unknown
  misc_feature (1)..( 11): Result.006 file - promoters50/5668111
tctttaaactg

SEQ ID NO: 198819 - DNA, 11 bp, Unknown
  misc_feature (1)..( 11): Result.006 file - promoters50/5668111
gctcgaaaaag

SEQ ID NO: 198820 - DNA, 11 bp, Unknown
  misc_feature (1)..( 11): Result.006 file - promoters50/5668111
gttagaaaaat

SEQ ID NO: 198821 - DNA, 11 bp, Unknown
  misc_feature (1)..( 11): Result.006 file - promoters50/5668111
ggaggaacaat

SEQ ID NO: 198822 - DNA, 11 bp, Unknown
  misc_feature (1)..( 11): Result.006 file - promoters50/5668111
cgattaaatgt

SEQ ID NO: 198823 - DNA, 10 bp, Unknown
  misc_feature (1)..( 10): Result.006 file - promoters50/5668111
taaatcaatc

SEQ ID NO: 198824 - DNA, 10 bp, Unknown
  misc_feature (1)..( 10): Result.006 file - promoters50/5668111
aaaaccaaca

SEQ ID NO: 198825 - DNA, 10 bp, Unknown
  misc_feature (1)..( 10): Result.006 file - promoters50/5668111
ctaatcaaaa

SEQ ID NO: 198826 - DNA, 10 bp, Unknown
  misc_feature (1)..( 10): Result.006 file - promoters50/5668111
cgtatcaaaa

SEQ ID NO: 198827 - DNA, 10 bp, Unknown
  misc_feature (1)..( 10): Result.006 file - promoters50/5668111
taaacaaagc

SEQ ID NO: 198828 - DNA, 10 bp, Unknown
  misc_feature (1)..( 10): Result.006 file - promoters50/5668162
aaaacaaaaa

SEQ ID NO: 198829 - DNA, 8 bp, Unknown
  misc_feature (1)..( 8): Result.006 file - promoters50/5668162
ttttattt

SEQ ID NO: 198830 - DNA, 8 bp, Unknown
  misc_feature (1)..( 8): Result.006 file - promoters50/5668162
ttttattt

SEQ ID NO: 198831 - DNA, 8 bp, Unknown
  misc_feature (1)..( 8): Result.006 file - promoters50/5668277
attaattt

SEQ ID NO: 198832 - DNA, 8 bp, Unknown
  misc_feature (1)..( 8): Result.006 file - promoters50/5668277
tctatcat

SEQ ID NO: 198833 - DNA, 8 bp, Unknown
  misc_feature (1)..( 8): Result.006 file - promoters50/5668277
tctctcac

SEQ ID NO: 198834 - DNA, 8 bp, Unknown
  misc_feature (1)..( 8): Result.006 file - promoters50/5668294
attctcac

SEQ ID NO: 198835 - DNA, 9 bp, Unknown
  misc_feature (1)..( 9): Result.006 file - promoters50/5668294
cattgatat

SEQ ID NO: 198836 - DNA, 9 bp, Unknown
  misc_feature (1)..( 9): Result.006 file - promoters50/5668294
aattgattc

SEQ ID NO: 198837 - DNA, 9 bp, Unknown
  misc_feature (1)..( 9): Result.006 file - promoters50/5668294
catagattc

SEQ ID NO: 198838 - DNA, 9 bp, Unknown
  misc_feature (1)..( 9): Result.006 file - promoters50/5668294
cctagtttc

SEQ ID NO: 198839 - DNA, 9 bp, Unknown
  misc_feature (1)..( 9): Result.006 file - promoters50/5668294
catagagaa

SEQ ID NO: 198840 - DNA, 9 bp, Unknown
  misc_feature (1)..( 9): Result.006 file - promoters50/5668294
aatagatta

SEQ ID NO: 198841 - DNA, 12 bp, Unknown
  misc_feature (1)..( 12): Result.006 file - promoters50/5668294
ggtgaaaatgaa

SEQ ID NO: 198842 - DNA, 12 bp, Unknown
  misc_feature (1)..( 12): Result.006 file - promoters50/5668294
ggataaaatgtg

SEQ ID NO: 198843 - DNA, 12 bp, Unknown
  misc_feature (1)..( 12): Result.006 file - promoters50/5668294
tgacaaaatgga

SEQ ID NO: 198844 - DNA, 12 bp, Unknown
  misc_feature (1)..( 12): Result.006 file - promoters50/5668294
gattaaaatgtc

SEQ ID NO: 198845 - DNA, 12 bp, Unknown
  misc_feature (1)..( 12): Result.006 file - promoters50/5668294
caggaaaaagaa

SEQ ID NO: 198846 - DNA, 12 bp, Unknown
  misc_feature (1)..( 12): Result.006 file - promoters50/5668294
ctgtaacatggc

SEQ ID NO: 198847 - DNA, 12 bp, Unknown
  misc_feature (1)..( 12): Result.006 file - promoters50/5668294
aaacaaaaactc

SEQ ID NO: 198848 - DNA, 11 bp, Unknown
  misc_feature (1)..( 11): Result.006 file - promoters50/5668294
atagataaatg

SEQ ID NO: 198849 - DNA, 11 bp, Unknown
  misc_feature (1)..( 11): Result.006 file - promoters50/5668294
agggataaaat

SEQ ID NO: 198850 - DNA, 11 bp, Unknown
  misc_feature (1)..( 11): Result.006 file - promoters50/5668294
ggagataactt

SEQ ID NO: 198851 - DNA, 11 bp, Unknown
  misc_feature (1)..( 11): Result.006 file - promoters50/5668294
aaagaaaaaaa

SEQ ID NO: 198852 - DNA, 11 bp, Unknown
  misc_feature (1)..( 11): Result.006 file - promoters50/5668294
ggagatacatc

SEQ ID NO: 198853 - DNA, 11 bp, Unknown
  misc_feature (1)..( 11): Result.006 file - promoters50/5668306
ctaaacaaaaa

SEQ ID NO: 198854 - DNA, 10 bp, Unknown
  misc_feature (1)..( 10): Result.006 file - promoters50/5668306
atccaagaag

SEQ ID NO: 198855 - DNA, 10 bp, Unknown
  misc_feature (1)..( 10): Result.006 file - promoters50/5668306
atctaagata

SEQ ID NO: 198856 - DNA, 10 bp, Unknown
  misc_feature (1)..( 10): Result.006 file - promoters50/5668306
ttacaaaaag

SEQ ID NO: 198857 - DNA, 8 bp, Unknown
  misc_feature (1)..( 8): Result.006 file - promoters50/5668306
caacactc

SEQ ID NO: 198858 - DNA, 8 bp, Unknown
  misc_feature (1)..( 8): Result.006 file - promoters50/5668306
aaacactt

SEQ ID NO: 198859 - DNA, 8 bp, Unknown
  misc_feature (1)..( 8): Result.006 file - promoters50/5668310
aaaaactt

SEQ ID NO: 198860 - DNA, 8 bp, Unknown
  misc_feature (1)..( 8): Result.006 file - promoters50/5668310
tgagaaaa

SEQ ID NO: 198861 - DNA, 8 bp, Unknown
  misc_feature (1)..( 8): Result.006 file - promoters50/5668310
tgaggaaa

SEQ ID NO: 198862 - DNA, 8 bp, Unknown
  misc_feature (1)..( 8): Result.006 file - promoters50/5668310
tgatgaag

SEQ ID NO: 198863 - DNA, 9 bp, Unknown
  misc_feature (1)..( 9): Result.006 file - promoters50/5668310
tggattgtg

SEQ ID NO: 198864 - DNA, 9 bp, Unknown
  misc_feature (1)..( 9): Result.006 file - promoters50/5668310
tggtttgtc

SEQ ID NO: 198865 - DNA, 9 bp, Unknown
  misc_feature (1)..( 9): Result.006 file - promoters50/5668317
cccattgtg

SEQ ID NO: 198866 - DNA, 15 bp, Unknown
  misc_feature (1)..( 15): Result.006 file - promoters50/5668317
ctgaatctttaagcc

SEQ ID NO: 198867 - DNA, 15 bp, Unknown
  misc_feature (1)..( 15): Result.006 file - promoters50/5668317
aagaaactttgtgat

SEQ ID NO: 198868 - DNA, 15 bp, Unknown
  misc_feature (1)..( 15): Result.006 file - promoters50/5668317
acgaaacaaagaaac

SEQ ID NO: 198869 - DNA, 15 bp, Unknown
  misc_feature (1)..( 15): Result.006 file - promoters50/5668317
acgaaactactacta

SEQ ID NO: 198870 - DNA, 15 bp, Unknown
  misc_feature (1)..( 15): Result.006 file - promoters50/5668317
atcaaacttataagt

SEQ ID NO: 198871 - DNA, 15 bp, Unknown
  misc_feature (1)..( 15): Result.006 file - promoters50/5668317
tataaagtttagtat

SEQ ID NO: 198872 - DNA, 11 bp, Unknown
  misc_feature (1)..( 11): Result.006 file - promoters50/5668317
aaaagtgagtg

SEQ ID NO: 198873 - DNA, 11 bp, Unknown
  misc_feature (1)..( 11): Result.006 file - promoters50/5668317
caaagtgtgtg

SEQ ID NO: 198874 - DNA, 11 bp, Unknown
  misc_feature (1)..( 11): Result.006 file - promoters50/5668317
aaaagagtttt

SEQ ID NO: 198875 - DNA, 11 bp, Unknown
  misc_feature (1)..( 11): Result.006 file - promoters50/5668317
ttttgtgtgtg

SEQ ID NO: 198876 - DNA, 11 bp, Unknown
  misc_feature (1)..( 11): Result.006 file - promoters50/5668317
cttagtgggcc

SEQ ID NO: 198877 - DNA, 11 bp, Unknown
  misc_feature (1)..( 11): Result.006 file - promoters50/5668317
aaaagaccgta

SEQ ID NO: 198878 - DNA, 14 bp, Unknown
  misc_feature (1)..( 14): Result.006 file - promoters50/5668317
aaatgtaaattaat

SEQ ID NO: 198879 - DNA, 14 bp, Unknown
  misc_feature (1)..( 14): Result.006 file - promoters50/5668317
aaaaagaaattaaa

SEQ ID NO: 198880 - DNA, 14 bp, Unknown
  misc_feature (1)..( 14): Result.006 file - promoters50/5668317
attgaaagattaat

SEQ ID NO: 198881 - DNA, 14 bp, Unknown
  misc_feature (1)..( 14): Result.006 file - promoters50/5668317
cccaagacatttac

SEQ ID NO: 198882 - DNA, 14 bp, Unknown
  misc_feature (1)..( 14): Result.006 file - promoters50/5668317
aaaaagtaattagg

SEQ ID NO: 198883 - DNA, 14 bp, Unknown
  misc_feature (1)..( 14): Result.006 file - promoters50/5668325
tagatgcaagtaaa

SEQ ID NO: 198884 - DNA, 9 bp, Unknown
  misc_feature (1)..( 9): Result.006 file - promoters50/5668325
tttggagaa

SEQ ID NO: 198885 - DNA, 9 bp, Unknown
  misc_feature (1)..( 9): Result.006 file - promoters50/5668325
tttggattt

SEQ ID NO: 198886 - DNA, 9 bp, Unknown
  misc_feature (1)..( 9): Result.006 file - promoters50/5668325
tttgtattc

SEQ ID NO: 198887 - DNA, 9 bp, Unknown
  misc_feature (1)..( 9): Result.006 file - promoters50/5668325
attggattt

SEQ ID NO: 198888 - DNA, 14 bp, Unknown
  misc_feature (1)..( 14): Result.006 file - promoters50/5668325
tctgttattgtttt

SEQ ID NO: 198889 - DNA, 14 bp, Unknown
  misc_feature (1)..( 14): Result.006 file - promoters50/5668325
aatcaaattttttt

SEQ ID NO: 198890 - DNA, 14 bp, Unknown
  misc_feature (1)..( 14): Result.006 file - promoters50/5668325
aaaaacaaagttta

SEQ ID NO: 198891 - DNA, 14 bp, Unknown
  misc_feature (1)..( 14): Result.006 file - promoters50/5668348
tatactaaagtttc

SEQ ID NO: 198892 - DNA, 8 bp, Unknown
  misc_feature (1)..( 8): Result.006 file - promoters50/5668348
gattgcga

SEQ ID NO: 198893 - DNA, 8 bp, Unknown
  misc_feature (1)..( 8): Result.006 file - promoters50/5668348
aatttcga

SEQ ID NO: 198894 - DNA, 8 bp, Unknown
  misc_feature (1)..( 8): Result.006 file - promoters50/5668352
aatttcgt

SEQ ID NO: 198895 - DNA, 12 bp, Unknown
  misc_feature (1)..( 12): Result.006 file - promoters50/5668352
gaataaatagtt

SEQ ID NO: 198896 - DNA, 12 bp, Unknown
  misc_feature (1)..( 12): Result.006 file - promoters50/5668352
gaaaaaagatga

SEQ ID NO: 198897 - DNA, 12 bp, Unknown
  misc_feature (1)..( 12): Result.006 file - promoters50/5668352
gaagaaaaaaat

SEQ ID NO: 198898 - DNA, 12 bp, Unknown
  misc_feature (1)..( 12): Result.006 file - promoters50/5668352
gaataaagtaat

SEQ ID NO: 198899 - DNA, 12 bp, Unknown
  misc_feature (1)..( 12): Result.006 file - promoters50/5668352
aaataaaatatg

SEQ ID NO: 198900 - DNA, 12 bp, Unknown
  misc_feature (1)..( 12): Result.006 file - promoters50/5668352
aaacaaattttt

SEQ ID NO: 198901 - DNA, 12 bp, Unknown
  misc_feature (1)..( 12): Result.006 file - promoters50/5668352
atataacatatg

SEQ ID NO: 198902 - DNA, 13 bp, Unknown
  misc_feature (1)..( 13): Result.006 file - promoters50/5668352
ttttctttaactg

SEQ ID NO: 198903 - DNA, 13 bp, Unknown
  misc_feature (1)..( 13): Result.006 file - promoters50/5668352
gtatcttcaacta

SEQ ID NO: 198904 - DNA, 13 bp, Unknown
  misc_feature (1)..( 13): Result.006 file - promoters50/5668352
gtttttttatggc

SEQ ID NO: 198905 - DNA, 13 bp, Unknown
  misc_feature (1)..( 13): Result.006 file - promoters50/5668352
tcttcattatttg

SEQ ID NO: 198906 - DNA, 13 bp, Unknown
  misc_feature (1)..( 13): Result.006 file - promoters50/5668352
ttttgtttagtgt

SEQ ID NO: 198907 - DNA, 13 bp, Unknown
  misc_feature (1)..( 13): Result.006 file - promoters50/5668352
aattgaacaacta

SEQ ID NO: 198908 - DNA, 13 bp, Unknown
  misc_feature (1)..( 13): Result.006 file - promoters50/5668352
gcaattttatgtg

SEQ ID NO: 198909 - DNA, 15 bp, Unknown
  misc_feature (1)..( 15): Result.006 file - promoters50/5668352
ggaaaaacattatta

SEQ ID NO: 198910 - DNA, 15 bp, Unknown
  misc_feature (1)..( 15): Result.006 file - promoters50/5668352
taaaatacatgatta

SEQ ID NO: 198911 - DNA, 15 bp, Unknown
  misc_feature (1)..( 15): Result.006 file - promoters50/5668352
aaagaaagatttgta

SEQ ID NO: 198912 - DNA, 15 bp, Unknown
  misc_feature (1)..( 15): Result.006 file - promoters50/5668352
agtaatataaattag

SEQ ID NO: 198913 - DNA, 15 bp, Unknown
  misc_feature (1)..( 15): Result.006 file - promoters50/5668352
agtaacatatgatgc

SEQ ID NO: 198914 - DNA, 15 bp, Unknown
  misc_feature (1)..( 15): Result.006 file - promoters50/5668352
agtaatatttgagcg

SEQ ID NO: 198915 - DNA, 15 bp, Unknown
  misc_feature (1)..( 15): Result.006 file - promoters50/5668352
aaacatacaaaaaga

SEQ ID NO: 198916 - DNA, 11 bp, Unknown
  misc_feature (1)..( 11): Result.006 file - promoters50/5668352
agtaatataaa

SEQ ID NO: 198917 - DNA, 11 bp, Unknown
  misc_feature (1)..( 11): Result.006 file - promoters50/5668352
taaaatataaa

SEQ ID NO: 198918 - DNA, 11 bp, Unknown
  misc_feature (1)..( 11): Result.006 file - promoters50/5668352
agtaacatatg

SEQ ID NO: 198919 - DNA, 11 bp, Unknown
  misc_feature (1)..( 11): Result.006 file - promoters50/5668352
agtaatatttg

SEQ ID NO: 198920 - DNA, 11 bp, Unknown
  misc_feature (1)..( 11): Result.006 file - promoters50/5668352
aaacatacaaa

SEQ ID NO: 198921 - DNA, 11 bp, Unknown
  misc_feature (1)..( 11): Result.006 file - promoters50/5668356
ttgtatataaa

SEQ ID NO: 198922 - DNA, 7 bp, Unknown
  misc_feature (1)..( 7): Result.006 file - promoters50/5668356
aaaaatg

SEQ ID NO: 198923 - DNA, 7 bp, Unknown
  misc_feature (1)..( 7): Result.006 file - promoters50/5668356
aaaaatt

SEQ ID NO: 198924 - DNA, 7 bp, Unknown
  misc_feature (1)..( 7): Result.006 file - promoters50/5668356
gaaaatg

SEQ ID NO: 198925 - DNA, 7 bp, Unknown
  misc_feature (1)..( 7): Result.006 file - promoters50/5668359
gaaaatt

SEQ ID NO: 198926 - DNA, 8 bp, Unknown
  misc_feature (1)..( 8): Result.006 file - promoters50/5668359
atggatgt

SEQ ID NO: 198927 - DNA, 8 bp, Unknown
  misc_feature (1)..( 8): Result.006 file - promoters50/5668359
atggattt

SEQ ID NO: 198928 - DNA, 8 bp, Unknown
  misc_feature (1)..( 8): Result.006 file - promoters50/5668359
ttggattt

SEQ ID NO: 198929 - DNA, 8 bp, Unknown
  misc_feature (1)..( 8): Result.006 file - promoters50/5668359
taaactac

SEQ ID NO: 198930 - DNA, 8 bp, Unknown
  misc_feature (1)..( 8): Result.006 file - promoters50/5668359
taatctaa

SEQ ID NO: 198931 - DNA, 8 bp, Unknown
  misc_feature (1)..( 8): Result.006 file - promoters50/5668367
caatttaa

SEQ ID NO: 198932 - DNA, 13 bp, Unknown
  misc_feature (1)..( 13): Result.006 file - promoters50/5668367
tcaacataaatta

SEQ ID NO: 198933 - DNA, 13 bp, Unknown
  misc_feature (1)..( 13): Result.006 file - promoters50/5668367
gaggaccaaatta

SEQ ID NO: 198934 - DNA, 13 bp, Unknown
  misc_feature (1)..( 13): Result.006 file - promoters50/5668367
gagaaccacattt

SEQ ID NO: 198935 - DNA, 9 bp, Unknown
  misc_feature (1)..( 9): Result.006 file - promoters50/5668367
ttttttaaa

SEQ ID NO: 198936 - DNA, 9 bp, Unknown
  misc_feature (1)..( 9): Result.006 file - promoters50/5668367
tttttcaaa

SEQ ID NO: 198937 - DNA, 9 bp, Unknown
  misc_feature (1)..( 9): Result.006 file - promoters50/5668367
gattctaaa

SEQ ID NO: 198938 - DNA, 14 bp, Unknown
  misc_feature (1)..( 14): Result.006 file - promoters50/5668367
tttttataacattt

SEQ ID NO: 198939 - DNA, 14 bp, Unknown
  misc_feature (1)..( 14): Result.006 file - promoters50/5668367
tttttataccattc

SEQ ID NO: 198940 - DNA, 14 bp, Unknown
  misc_feature (1)..( 14): Result.006 file - promoters50/5668367
ctaaattaacattt

SEQ ID NO: 198941 - DNA, 11 bp, Unknown
  misc_feature (1)..( 11): Result.006 file - promoters50/5668367
taaaaccaatt

SEQ ID NO: 198942 - DNA, 11 bp, Unknown
  misc_feature (1)..( 11): Result.006 file - promoters50/5668367
gaaaaacaatt

SEQ ID NO: 198943 - DNA, 11 bp, Unknown
  misc_feature (1)..( 11): Result.006 file - promoters50/5668367
gaaaaatttaa

SEQ ID NO: 198944 - DNA, 9 bp, Unknown
  misc_feature (1)..( 9): Result.006 file - promoters50/5668367
aacatttta

SEQ ID NO: 198945 - DNA, 9 bp, Unknown
  misc_feature (1)..( 9): Result.006 file - promoters50/5668367
tacaattta

SEQ ID NO: 198946 - DNA, 9 bp, Unknown
  misc_feature (1)..( 9): Result.006 file - promoters50/5668367
aaaaattta

SEQ ID NO: 198947 - DNA, 7 bp, Unknown
  misc_feature (1)..( 7): Result.006 file - promoters50/5668367
gttttct

SEQ ID NO: 198948 - DNA, 7 bp, Unknown
  misc_feature (1)..( 7): Result.006 file - promoters50/5668367
gttttcc

SEQ ID NO: 198949 - DNA, 7 bp, Unknown
  misc_feature (1)..( 7): Result.006 file - promoters50/5668367
cttttcc

SEQ ID NO: 198950 - DNA, 10 bp, Unknown
  misc_feature (1)..( 10): Result.006 file - promoters50/5668367
attgaatgga

SEQ ID NO: 198951 - DNA, 10 bp, Unknown
  misc_feature (1)..( 10): Result.006 file - promoters50/5668367
atttaatttt

SEQ ID NO: 198952 - DNA, 10 bp, Unknown
  misc_feature (1)..( 10): Result.006 file - promoters50/5668367
ttttagtttt

SEQ ID NO: 198953 - DNA, 15 bp, Unknown
  misc_feature (1)..( 15): Result.006 file - promoters50/5668367
aataaatacatcaca

SEQ ID NO: 198954 - DNA, 15 bp, Unknown
  misc_feature (1)..( 15): Result.006 file - promoters50/5668367
aataaatacatcaca

SEQ ID NO: 198955 - DNA, 15 bp, Unknown
  misc_feature (1)..( 15): Result.006 file - promoters50/5668367
tataaattcatctct

SEQ ID NO: 198956 - DNA, 15 bp, Unknown
  misc_feature (1)..( 15): Result.006 file - promoters50/5668367
tataaaatttaatcc

SEQ ID NO: 198957 - DNA, 9 bp, Unknown
  misc_feature (1)..( 9): Result.006 file - promoters50/5668367
attattttc

SEQ ID NO: 198958 - DNA, 9 bp, Unknown
  misc_feature (1)..( 9): Result.006 file - promoters50/5668367
atttttttc

SEQ ID NO: 198959 - DNA, 9 bp, Unknown
  misc_feature (1)..( 9): Result.006 file - promoters50/5668367
cttaatatc

SEQ ID NO: 198960 - DNA, 9 bp, Unknown
  misc_feature (1)..( 9): Result.006 file - promoters50/5668367
aaataatat

SEQ ID NO: 198961 - DNA, 9 bp, Unknown
  misc_feature (1)..( 9): Result.006 file - promoters50/5668367
atatagtat

SEQ ID NO: 198962 - DNA, 9 bp, Unknown
  misc_feature (1)..( 9): Result.006 file - promoters50/5668367
atatagtgt

SEQ ID NO: 198963 - DNA, 7 bp, Unknown
  misc_feature (1)..( 7): Result.006 file - promoters50/5668367
aatgatc

SEQ ID NO: 198964 - DNA, 7 bp, Unknown
  misc_feature (1)..( 7): Result.006 file - promoters50/5668367
catgatc

SEQ ID NO: 198965 - DNA, 7 bp, Unknown
  misc_feature (1)..( 7): Result.006 file - promoters50/5668367
catgatt

SEQ ID NO: 198966 - DNA, 9 bp, Unknown
  misc_feature (1)..( 9): Result.006 file - promoters50/5668367
ttttaatat

SEQ ID NO: 198967 - DNA, 9 bp, Unknown
  misc_feature (1)..( 9): Result.006 file - promoters50/5668367
tttgaatgg

SEQ ID NO: 198968 - DNA, 9 bp, Unknown
  misc_feature (1)..( 9): Result.006 file - promoters50/5668371
tttgagtgg

SEQ ID NO: 198969 - DNA, 7 bp, Unknown
  misc_feature (1)..( 7): Result.006 file - promoters50/5668371
ttttaat

SEQ ID NO: 198970 - DNA, 7 bp, Unknown
  misc_feature (1)..( 7): Result.006 file - promoters50/5668371
tttaaat

SEQ ID NO: 198971 - DNA, 7 bp, Unknown
  misc_feature (1)..( 7): Result.006 file - promoters50/5668375
ttttaat

SEQ ID NO: 198972 - DNA, 8 bp, Unknown
  misc_feature (1)..( 8): Result.006 file - promoters50/5668375
tcttttct

SEQ ID NO: 198973 - DNA, 8 bp, Unknown
  misc_feature (1)..( 8): Result.006 file - promoters50/5668375
tcttttcc

SEQ ID NO: 198974 - DNA, 8 bp, Unknown
  misc_feature (1)..( 8): Result.006 file - promoters50/5668375
gtttttct

SEQ ID NO: 198975 - DNA, 8 bp, Unknown
  misc_feature (1)..( 8): Result.006 file - promoters50/5668375
atttttct

SEQ ID NO: 198976 - DNA, 8 bp, Unknown
  misc_feature (1)..( 8): Result.006 file - promoters50/5668397
tcttttgg

SEQ ID NO: 198977 - DNA, 9 bp, Unknown
  misc_feature (1)..( 9): Result.006 file - promoters50/5668397
cgattcaat

SEQ ID NO: 198978 - DNA, 9 bp, Unknown
  misc_feature (1)..( 9): Result.006 file - promoters50/5668397
agattgaat

SEQ ID NO: 198979 - DNA, 9 bp, Unknown
  misc_feature (1)..( 9): Result.006 file - promoters50/5668397
agatattgc

SEQ ID NO: 198980 - DNA, 8 bp, Unknown
  misc_feature (1)..( 8): Result.006 file - promoters50/5668397
tcaacttc

SEQ ID NO: 198981 - DNA, 8 bp, Unknown
  misc_feature (1)..( 8): Result.006 file - promoters50/5668397
tcaacttt

SEQ ID NO: 198982 - DNA, 8 bp, Unknown
  misc_feature (1)..( 8): Result.006 file - promoters50/5668397
acaatttt

SEQ ID NO: 198983 - DNA, 11 bp, Unknown
  misc_feature (1)..( 11): Result.006 file - promoters50/5668397
taatctcttgt

SEQ ID NO: 198984 - DNA, 11 bp, Unknown
  misc_feature (1)..( 11): Result.006 file - promoters50/5668397
taatttctttt

SEQ ID NO: 198985 - DNA, 11 bp, Unknown
  misc_feature (1)..( 11): Result.006 file - promoters50/5668397
tgatttgtttt

SEQ ID NO: 198986 - DNA, 10 bp, Unknown
  misc_feature (1)..( 10): Result.006 file - promoters50/5668397
ttgaatcaat

SEQ ID NO: 198987 - DNA, 10 bp, Unknown
  misc_feature (1)..( 10): Result.006 file - promoters50/5668397
tggaaacaat

SEQ ID NO: 198988 - DNA, 10 bp, Unknown
  misc_feature (1)..( 10): Result.006 file - promoters50/5668435
tggagacagc

SEQ ID NO: 198989 - DNA, 9 bp, Unknown
  misc_feature (1)..( 9): Result.006 file - promoters50/5668435
ccaaacaac

SEQ ID NO: 198990 - DNA, 9 bp, Unknown
  misc_feature (1)..( 9): Result.006 file - promoters50/5668435
ccaaacaaa

SEQ ID NO: 198991 - DNA, 9 bp, Unknown
  misc_feature (1)..( 9): Result.006 file - promoters50/5668435
agaaacaaa

SEQ ID NO: 198992 - DNA, 9 bp, Unknown
  misc_feature (1)..( 9): Result.006 file - promoters50/5668435
aaaaacaaa

SEQ ID NO: 198993 - DNA, 9 bp, Unknown
  misc_feature (1)..( 9): Result.006 file - promoters50/5668435
tcaaagaaa

SEQ ID NO: 198994 - DNA, 10 bp, Unknown
  misc_feature (1)..( 10): Result.006 file - promoters50/5668439
taaaaccaag

SEQ ID NO: 198995 - DNA, 11 bp, Unknown
  misc_feature (1)..( 11): Result.006 file - promoters50/5668439
ttttcagaaag

SEQ ID NO: 198996 - DNA, 11 bp, Unknown
  misc_feature (1)..( 11): Result.006 file - promoters50/5668439
tttttagatgt

SEQ ID NO: 198997 - DNA, 11 bp, Unknown
  misc_feature (1)..( 11): Result.006 file - promoters50/5668439
ttttgatcagt

SEQ ID NO: 198998 - DNA, 11 bp, Unknown
  misc_feature (1)..( 11): Result.006 file - promoters50/5668439
gaattagctgt

SEQ ID NO: 198999 - DNA, 12 bp, Unknown
  misc_feature (1)..( 12): Result.006 file - promoters50/5668439
aattaaataaaa

SEQ ID NO: 199000 - DNA, 12 bp, Unknown
  misc_feature (1)..( 12): Result.006 file - promoters50/5668439
cattagataaaa

SEQ ID NO: 199001 - DNA, 12 bp, Unknown
  misc_feature (1)..( 12): Result.006 file - promoters50/5668439
cattaggttcaa

SEQ ID NO: 199002 - DNA, 7 bp, Unknown
  misc_feature (1)..( 7): Result.006 file - promoters50/5668439
aaaagaa

SEQ ID NO: 199003 - DNA, 7 bp, Unknown
  misc_feature (1)..( 7): Result.006 file - promoters50/5668439
aaaagag

SEQ ID NO: 199004 - DNA, 7 bp, Unknown
  misc_feature (1)..( 7): Result.006 file - promoters50/5668439
aaaggaa

SEQ ID NO: 199005 - DNA, 7 bp, Unknown
  misc_feature (1)..( 7): Result.006 file - promoters50/5668439
tatgaca

SEQ ID NO: 199006 - DNA, 7 bp, Unknown
  misc_feature (1)..( 7): Result.006 file - promoters50/5668439
gatgaca

SEQ ID NO: 199007 - DNA, 7 bp, Unknown
  misc_feature (1)..( 7): Result.006 file - promoters50/5668454
gataaca

SEQ ID NO: 199008 - DNA, 9 bp, Unknown
  misc_feature (1)..( 9): Result.006 file - promoters50/5668454
aaaaataaa

SEQ ID NO: 199009 - DNA, 9 bp, Unknown
  misc_feature (1)..( 9): Result.006 file - promoters50/5668454
taaaataat

SEQ ID NO: 199010 - DNA, 9 bp, Unknown
  misc_feature (1)..( 9): Result.006 file - promoters50/5668454
aaaaattcc

SEQ ID NO: 199011 - DNA, 9 bp, Unknown
  misc_feature (1)..( 9): Result.006 file - promoters50/5668454
taaattaat

SEQ ID NO: 199012 - DNA, 9 bp, Unknown
  misc_feature (1)..( 9): Result.006 file - promoters50/5668454
ataaataat

SEQ ID NO: 199013 - DNA, 9 bp, Unknown
  misc_feature (1)..( 9): Result.006 file - promoters50/5668454
taaaacatt

SEQ ID NO: 199014 - DNA, 9 bp, Unknown
  misc_feature (1)..( 9): Result.006 file - promoters50/5668457
ttaagtaaa

SEQ ID NO: 199015 - DNA, 9 bp, Unknown
  misc_feature (1)..( 9): Result.006 file - promoters50/5668457
cagttacta

SEQ ID NO: 199016 - DNA, 9 bp, Unknown
  misc_feature (1)..( 9): Result.006 file - promoters50/5668457
ttgtttcta

SEQ ID NO: 199017 - DNA, 9 bp, Unknown
  misc_feature (1)..( 9): Result.006 file - promoters50/5668457
ttgtttctt

SEQ ID NO: 199018 - DNA, 7 bp, Unknown
  misc_feature (1)..( 7): Result.006 file - promoters50/5668457
tttttgg

SEQ ID NO: 199019 - DNA, 7 bp, Unknown
  misc_feature (1)..( 7): Result.006 file - promoters50/5668457
gttttgg

SEQ ID NO: 199020 - DNA, 8 bp, Unknown
  misc_feature (1)..( 8): Result.006 file - promoters50/5668457
tttattga

SEQ ID NO: 199021 - DNA, 8 bp, Unknown
  misc_feature (1)..( 8): Result.006 file - promoters50/5668457
tttctata

SEQ ID NO: 199022 - DNA, 8 bp, Unknown
  misc_feature (1)..( 8): Result.006 file - promoters50/5668457
tttatata

SEQ ID NO: 199023 - DNA, 8 bp, Unknown
  misc_feature (1)..( 8): Result.006 file - promoters50/5668457
tttctaac

SEQ ID NO: 199024 - DNA, 7 bp, Unknown
  misc_feature (1)..( 7): Result.006 file - promoters50/5668457
aatgcaa

SEQ ID NO: 199025 - DNA, 7 bp, Unknown
  misc_feature (1)..( 7): Result.006 file - promoters50/5668457
gatgcaa

SEQ ID NO: 199026 - DNA, 7 bp, Unknown
  misc_feature (1)..( 7): Result.006 file - promoters50/5668457
aatccaa

SEQ ID NO: 199027 - DNA, 11 bp, Unknown
  misc_feature (1)..( 11): Result.006 file - promoters50/5668457
caatgtttact

SEQ ID NO: 199028 - DNA, 11 bp, Unknown
  misc_feature (1)..( 11): Result.006 file - promoters50/5668457
acatggttact

SEQ ID NO: 199029 - DNA, 11 bp, Unknown
  misc_feature (1)..( 11): Result.006 file - promoters50/5668457
caaagttgcaa

SEQ ID NO: 199030 - DNA, 7 bp, Unknown
  misc_feature (1)..( 7): Result.006 file - promoters50/5668457
gagtttt

SEQ ID NO: 199031 - DNA, 7 bp, Unknown
  misc_feature (1)..( 7): Result.006 file - promoters50/5668457
gagtttt

SEQ ID NO: 199032 - DNA, 7 bp, Unknown
  misc_feature (1)..( 7): Result.006 file - promoters50/5668457
aagtttt

SEQ ID NO: 199033 - DNA, 8 bp, Unknown
  misc_feature (1)..( 8): Result.006 file - promoters50/5668457
ggttgatg

SEQ ID NO: 199034 - DNA, 8 bp, Unknown
  misc_feature (1)..( 8): Result.006 file - promoters50/5668457
ggttgaca

SEQ ID NO: 199035 - DNA, 7 bp, Unknown
  misc_feature (1)..( 7): Result.006 file - promoters50/5668469
gtttatg

SEQ ID NO: 199036 - DNA, 11 bp, Unknown
  misc_feature (1)..( 11): Result.006 file - promoters50/5668469
tttttgttatc

SEQ ID NO: 199037 - DNA, 11 bp, Unknown
  misc_feature (1)..( 11): Result.006 file - promoters50/5668469
tgtttcttacg

SEQ ID NO: 199038 - DNA, 11 bp, Unknown
  misc_feature (1)..( 11): Result.006 file - promoters50/5668469
aatttattaac

SEQ ID NO: 199039 - DNA, 11 bp, Unknown
  misc_feature (1)..( 11): Result.006 file - promoters50/5668469
gatttgttaca

SEQ ID NO: 199040 - DNA, 11 bp, Unknown
  misc_feature (1)..( 11): Result.006 file - promoters50/5668469
tttttgtttgt

SEQ ID NO: 199041 - DNA, 11 bp, Unknown
  misc_feature (1)..( 11): Result.006 file - promoters50/5668485
catttatgaag

SEQ ID NO: 199042 - DNA, 8 bp, Unknown
  misc_feature (1)..( 8): Result.006 file - promoters50/5668485
gatcaaat

SEQ ID NO: 199043 - DNA, 8 bp, Unknown
  misc_feature (1)..( 8): Result.006 file - promoters50/5668485
tttcaaat

SEQ ID NO: 199044 - DNA, 8 bp, Unknown
  misc_feature (1)..( 8): Result.006 file - promoters50/5668485
ttttaaat

SEQ ID NO: 199045 - DNA, 11 bp, Unknown
  misc_feature (1)..( 11): Result.006 file - promoters50/5668485
taccaaagttg

SEQ ID NO: 199046 - DNA, 11 bp, Unknown
  misc_feature (1)..( 11): Result.006 file - promoters50/5668485
atccaaaggat

SEQ ID NO: 199047 - DNA, 11 bp, Unknown
  misc_feature (1)..( 11): Result.006 file - promoters50/5668485
tacgaaaattg

SEQ ID NO: 199048 - DNA, 10 bp, Unknown
  misc_feature (1)..( 10): Result.006 file - promoters50/5668485
atttttaatc

SEQ ID NO: 199049 - DNA, 10 bp, Unknown
  misc_feature (1)..( 10): Result.006 file - promoters50/5668485
atttttaaat

SEQ ID NO: 199050 - DNA, 10 bp, Unknown
  misc_feature (1)..( 10): Result.006 file - promoters50/5668485
agtttcaaat

SEQ ID NO: 199051 - DNA, 7 bp, Unknown
  misc_feature (1)..( 7): Result.006 file - promoters50/5668485
agatgca

SEQ ID NO: 199052 - DNA, 7 bp, Unknown
  misc_feature (1)..( 7): Result.006 file - promoters50/5668485
tgatgca

SEQ ID NO: 199053 - DNA, 7 bp, Unknown
  misc_feature (1)..( 7): Result.006 file - promoters50/5668493
tgatgcc

SEQ ID NO: 199054 - DNA, 12 bp, Unknown
  misc_feature (1)..( 12): Result.006 file - promoters50/5668493
cttgtcttttta

SEQ ID NO: 199055 - DNA, 12 bp, Unknown
  misc_feature (1)..( 12): Result.006 file - promoters50/5668493
cttgtgtttgat

SEQ ID NO: 199056 - DNA, 12 bp, Unknown
  misc_feature (1)..( 12): Result.006 file - promoters50/5668493
attgtatttatt

SEQ ID NO: 199057 - DNA, 12 bp, Unknown
  misc_feature (1)..( 12): Result.006 file - promoters50/5668493
ggcttctttttt

SEQ ID NO: 199058 - DNA, 12 bp, Unknown
  misc_feature (1)..( 12): Result.006 file - promoters50/5668493
ggtttgtttact

SEQ ID NO: 199059 - DNA, 12 bp, Unknown
  misc_feature (1)..( 12): Result.006 file - promoters50/5668493
tgtttctttttt

SEQ ID NO: 199060 - DNA, 11 bp, Unknown
  misc_feature (1)..( 11): Result.006 file - promoters50/5668493
tctttttattt

SEQ ID NO: 199061 - DNA, 11 bp, Unknown
  misc_feature (1)..( 11): Result.006 file - promoters50/5668493
gtgtttgatta

SEQ ID NO: 199062 - DNA, 11 bp, Unknown
  misc_feature (1)..( 11): Result.006 file - promoters50/5668493
tgtatttattt

SEQ ID NO: 199063 - DNA, 11 bp, Unknown
  misc_feature (1)..( 11): Result.006 file - promoters50/5668493
cggtttgttta

SEQ ID NO: 199064 - DNA, 11 bp, Unknown
  misc_feature (1)..( 11): Result.006 file - promoters50/5668493
ttctttttttg

SEQ ID NO: 199065 - DNA, 11 bp, Unknown
  misc_feature (1)..( 11): Result.006 file - promoters50/5668493
ttcttttttca

SEQ ID NO: 199066 - DNA, 17 bp, Unknown
  misc_feature (1)..( 17): Result.006 file - promoters50/5668493
aaaaattatcaccccaa

SEQ ID NO: 199067 - DNA, 17 bp, Unknown
  misc_feature (1)..( 17): Result.006 file - promoters50/5668493
tgtggttatcaaattga

SEQ ID NO: 199068 - DNA, 17 bp, Unknown
  misc_feature (1)..( 17): Result.006 file - promoters50/5668493
aaaaattctcaaatatt

SEQ ID NO: 199069 - DNA, 17 bp, Unknown
  misc_feature (1)..( 17): Result.006 file - promoters50/5668493
tcgaataatctcagaat

SEQ ID NO: 199070 - DNA, 17 bp, Unknown
  misc_feature (1)..( 17): Result.006 file - promoters50/5668493
aagaataaaaattgatt

SEQ ID NO: 199071 - DNA, 17 bp, Unknown
  misc_feature (1)..( 17): Result.006 file - promoters50/5668493
agtttttaccaaaatga

SEQ ID NO: 199072 - DNA, 11 bp, Unknown
  misc_feature (1)..( 11): Result.006 file - promoters50/5668493
caagtaatttt

SEQ ID NO: 199073 - DNA, 11 bp, Unknown
  misc_feature (1)..( 11): Result.006 file - promoters50/5668493
ggcctaatttt

SEQ ID NO: 199074 - DNA, 11 bp, Unknown
  misc_feature (1)..( 11): Result.006 file - promoters50/5668493
caaataatttt

SEQ ID NO: 199075 - DNA, 11 bp, Unknown
  misc_feature (1)..( 11): Result.006 file - promoters50/5668493
caaatattcaa

SEQ ID NO: 199076 - DNA, 11 bp, Unknown
  misc_feature (1)..( 11): Result.006 file - promoters50/5668493
tccataattgt

SEQ ID NO: 199077 - DNA, 11 bp, Unknown
  misc_feature (1)..( 11): Result.006 file - promoters50/5668497
caaagaattat

SEQ ID NO: 199078 - DNA, 12 bp, Unknown
  misc_feature (1)..( 12): Result.006 file - promoters50/5668497
ctctcaaggttt

SEQ ID NO: 199079 - DNA, 12 bp, Unknown
  misc_feature (1)..( 12): Result.006 file - promoters50/5668497
aactcaagattt

SEQ ID NO: 199080 - DNA, 12 bp, Unknown
  misc_feature (1)..( 12): Result.006 file - promoters50/5668497
aacacaaattaa

SEQ ID NO: 199081 - DNA, 7 bp, Unknown
  misc_feature (1)..( 7): Result.006 file - promoters50/5668497
atgtttt

SEQ ID NO: 199082 - DNA, 7 bp, Unknown
  misc_feature (1)..( 7): Result.006 file - promoters50/5668497
ttgtttt

SEQ ID NO: 199083 - DNA, 7 bp, Unknown
  misc_feature (1)..( 7): Result.006 file - promoters50/5668497
ttgattt

SEQ ID NO: 199084 - DNA, 8 bp, Unknown
  misc_feature (1)..( 8): Result.006 file - promoters50/5668497
tttgtctg

SEQ ID NO: 199085 - DNA, 8 bp, Unknown
  misc_feature (1)..( 8): Result.006 file - promoters50/5668497
tttatcta

SEQ ID NO: 199086 - DNA, 8 bp, Unknown
  misc_feature (1)..( 8): Result.006 file - promoters50/5668497
attaacta

SEQ ID NO: 199087 - DNA, 9 bp, Unknown
  misc_feature (1)..( 9): Result.006 file - promoters50/5668497
aaaatttga

SEQ ID NO: 199088 - DNA, 9 bp, Unknown
  misc_feature (1)..( 9): Result.006 file - promoters50/5668497
gaaacttga

SEQ ID NO: 199089 - DNA, 9 bp, Unknown
  misc_feature (1)..( 9): Result.006 file - promoters50/5668509
gaaactgat

SEQ ID NO: 199090 - DNA, 9 bp, Unknown
  misc_feature (1)..( 9): Result.006 file - promoters50/5668509
taaaatttc

SEQ ID NO: 199091 - DNA, 9 bp, Unknown
  misc_feature (1)..( 9): Result.006 file - promoters50/5668509
caaaattaa

SEQ ID NO: 199092 - DNA, 9 bp, Unknown
  misc_feature (1)..( 9): Result.006 file - promoters50/5668509
aaaaattaa

SEQ ID NO: 199093 - DNA, 10 bp, Unknown
  misc_feature (1)..( 10): Result.006 file - promoters50/5668509
taacaattct

SEQ ID NO: 199094 - DNA, 10 bp, Unknown
  misc_feature (1)..( 10): Result.006 file - promoters50/5668509
actaaattag

SEQ ID NO: 199095 - DNA, 10 bp, Unknown
  misc_feature (1)..( 10): Result.006 file - promoters50/5668509
aaaatattaa

SEQ ID NO: 199096 - DNA, 11 bp, Unknown
  misc_feature (1)..( 11): Result.006 file - promoters50/5668509
catataacaaa

SEQ ID NO: 199097 - DNA, 11 bp, Unknown
  misc_feature (1)..( 11): Result.006 file - promoters50/5668509
catttaatcaa

SEQ ID NO: 199098 - DNA, 11 bp, Unknown
  misc_feature (1)..( 11): Result.006 file - promoters50/5668509
gatatatcaaa

SEQ ID NO: 199099 - DNA, 11 bp, Unknown
  misc_feature (1)..( 11): Result.006 file - promoters50/5668509
gctataacgaa

SEQ ID NO: 199100 - DNA, 11 bp, Unknown
  misc_feature (1)..( 11): Result.006 file - promoters50/5668509
attataaaata

SEQ ID NO: 199101 - DNA, 11 bp, Unknown
  misc_feature (1)..( 11): Result.006 file - promoters50/5668509
actatccaacc

SEQ ID NO: 199102 - DNA, 11 bp, Unknown
  misc_feature (1)..( 11): Result.006 file - promoters50/5668509
cctcaaacata

SEQ ID NO: 199103 - DNA, 11 bp, Unknown
  misc_feature (1)..( 11): Result.006 file - promoters50/5668509
aatcaaaaata

SEQ ID NO: 199104 - DNA, 11 bp, Unknown
  misc_feature (1)..( 11): Result.006 file - promoters50/5668509
tatcaaacaat

SEQ ID NO: 199105 - DNA, 11 bp, Unknown
  misc_feature (1)..( 11): Result.006 file - promoters50/5668509
aacgaaaaata

SEQ ID NO: 199106 - DNA, 11 bp, Unknown
  misc_feature (1)..( 11): Result.006 file - promoters50/5668509
tataaaataca

SEQ ID NO: 199107 - DNA, 11 bp, Unknown
  misc_feature (1)..( 11): Result.006 file - promoters50/5668509
aataaaaatat

SEQ ID NO: 199108 - DNA, 11 bp, Unknown
  misc_feature (1)..( 11): Result.006 file - promoters50/5668509
atataacaaag

SEQ ID NO: 199109 - DNA, 11 bp, Unknown
  misc_feature (1)..( 11): Result.006 file - promoters50/5668509
aaataacagat

SEQ ID NO: 199110 - DNA, 11 bp, Unknown
  misc_feature (1)..( 11): Result.006 file - promoters50/5668509
atatatcaaac

SEQ ID NO: 199111 - DNA, 11 bp, Unknown
  misc_feature (1)..( 11): Result.006 file - promoters50/5668509
ctataacgaaa

SEQ ID NO: 199112 - DNA, 11 bp, Unknown
  misc_feature (1)..( 11): Result.006 file - promoters50/5668509
ttataaaatac

SEQ ID NO: 199113 - DNA, 11 bp, Unknown
  misc_feature (1)..( 11): Result.006 file - promoters50/5668509
gactatccaac

SEQ ID NO: 199114 - DNA, 9 bp, Unknown
  misc_feature (1)..( 9): Result.006 file - promoters50/5668509
gaacaaatg

SEQ ID NO: 199115 - DNA, 9 bp, Unknown
  misc_feature (1)..( 9): Result.006 file - promoters50/5668509
gaaaaaacg

SEQ ID NO: 199116 - DNA, 9 bp, Unknown
  misc_feature (1)..( 9): Result.006 file - promoters50/5668509
caactaatt

SEQ ID NO: 199117 - DNA, 9 bp, Unknown
  misc_feature (1)..( 9): Result.006 file - promoters50/5668509
taacaaact

SEQ ID NO: 199118 - DNA, 9 bp, Unknown
  misc_feature (1)..( 9): Result.006 file - promoters50/5668509
taataaaga

SEQ ID NO: 199119 - DNA, 9 bp, Unknown
  misc_feature (1)..( 9): Result.006 file - promoters50/5668509
aaatcaaga

SEQ ID NO: 199120 - DNA, 9 bp, Unknown
  misc_feature (1)..( 9): Result.006 file - promoters50/5668509
aaaccaatg

SEQ ID NO: 199121 - DNA, 14 bp, Unknown
  misc_feature (1)..( 14): Result.006 file - promoters50/5668509
ggaacaaaggagca

SEQ ID NO: 199122 - DNA, 14 bp, Unknown
  misc_feature (1)..( 14): Result.006 file - promoters50/5668509
gtaacaaataatta

SEQ ID NO: 199123 - DNA, 14 bp, Unknown
  misc_feature (1)..( 14): Result.006 file - promoters50/5668509
gtaacaattctaat

SEQ ID NO: 199124 - DNA, 14 bp, Unknown
  misc_feature (1)..( 14): Result.006 file - promoters50/5668509
ttaaaaattaaatg

SEQ ID NO: 199125 - DNA, 14 bp, Unknown
  misc_feature (1)..( 14): Result.006 file - promoters50/5668509
taactaaattagta

SEQ ID NO: 199126 - DNA, 14 bp, Unknown
  misc_feature (1)..( 14): Result.006 file - promoters50/5668529
tctgaaaatattaa

SEQ ID NO: 199127 - DNA, 10 bp, Unknown
  misc_feature (1)..( 10): Result.006 file - promoters50/5668529
tgaataataa

SEQ ID NO: 199128 - DNA, 10 bp, Unknown
  misc_feature (1)..( 10): Result.006 file - promoters50/5668529
aaaattatat

SEQ ID NO: 199129 - DNA, 10 bp, Unknown
  misc_feature (1)..( 10): Result.006 file - promoters50/5668529
tgaaaaatac

SEQ ID NO: 199130 - DNA, 10 bp, Unknown
  misc_feature (1)..( 10): Result.006 file - promoters50/5668529
taaaaattaa

SEQ ID NO: 199131 - DNA, 10 bp, Unknown
  misc_feature (1)..( 10): Result.006 file - promoters50/5668529
caaaaaatag

SEQ ID NO: 199132 - DNA, 10 bp, Unknown
  misc_feature (1)..( 10): Result.006 file - promoters50/5668533
gtggttatat

SEQ ID NO: 199133 - DNA, 10 bp, Unknown
  misc_feature (1)..( 10): Result.006 file - promoters50/5668533
aaaataaaaa

SEQ ID NO: 199134 - DNA, 10 bp, Unknown
  misc_feature (1)..( 10): Result.006 file - promoters50/5668533
tatataaaaa

SEQ ID NO: 199135 - DNA, 10 bp, Unknown
  misc_feature (1)..( 10): Result.006 file - promoters50/5668533
aaaataaatc

SEQ ID NO: 199136 - DNA, 10 bp, Unknown
  misc_feature (1)..( 10): Result.006 file - promoters50/5668533
agaataaaaa

SEQ ID NO: 199137 - DNA, 10 bp, Unknown
  misc_feature (1)..( 10): Result.006 file - promoters50/5668533
tgaacaaatt

SEQ ID NO: 199138 - DNA, 10 bp, Unknown
  misc_feature (1)..( 10): Result.006 file - promoters50/5668537
tgaatgaaac

SEQ ID NO: 199139 - DNA, 9 bp, Unknown
  misc_feature (1)..( 9): Result.006 file - promoters50/5668537
tattttggc

SEQ ID NO: 199140 - DNA, 9 bp, Unknown
  misc_feature (1)..( 9): Result.006 file - promoters50/5668537
tatttttac

SEQ ID NO: 199141 - DNA, 9 bp, Unknown
  misc_feature (1)..( 9): Result.006 file - promoters50/5668537
aattttttt

SEQ ID NO: 199142 - DNA, 13 bp, Unknown
  misc_feature (1)..( 13): Result.006 file - promoters50/5668537
caatgttttctca

SEQ ID NO: 199143 - DNA, 13 bp, Unknown
  misc_feature (1)..( 13): Result.006 file - promoters50/5668537
aattattttctta

SEQ ID NO: 199144 - DNA, 13 bp, Unknown
  misc_feature (1)..( 13): Result.006 file - promoters50/5668537
caatattttatca

SEQ ID NO: 199145 - DNA, 9 bp, Unknown
  misc_feature (1)..( 9): Result.006 file - promoters50/5668537
ataattctt

SEQ ID NO: 199146 - DNA, 9 bp, Unknown
  misc_feature (1)..( 9): Result.006 file - promoters50/5668537
gtaattcat

SEQ ID NO: 199147 - DNA, 9 bp, Unknown
  misc_feature (1)..( 9): Result.006 file - promoters50/5668537
ataatttcc

SEQ ID NO: 199148 - DNA, 9 bp, Unknown
  misc_feature (1)..( 9): Result.006 file - promoters50/5668537
tgaatgcat

SEQ ID NO: 199149 - DNA, 11 bp, Unknown
  misc_feature (1)..( 11): Result.006 file - promoters50/5668537
ggagctaaaat

SEQ ID NO: 199150 - DNA, 11 bp, Unknown
  misc_feature (1)..( 11): Result.006 file - promoters50/5668537
ttttctacaat

SEQ ID NO: 199151 - DNA, 11 bp, Unknown
  misc_feature (1)..( 11): Result.006 file - promoters50/5668537
ttttctaaaat

SEQ ID NO: 199152 - DNA, 11 bp, Unknown
  misc_feature (1)..( 11): Result.006 file - promoters50/5668537
tctcctaaaac

SEQ ID NO: 199153 - DNA, 8 bp, Unknown
  misc_feature (1)..( 8): Result.006 file - promoters50/5668537
taactttc

SEQ ID NO: 199154 - DNA, 8 bp, Unknown
  misc_feature (1)..( 8): Result.006 file - promoters50/5668537
taaatttc

SEQ ID NO: 199155 - DNA, 8 bp, Unknown
  misc_feature (1)..( 8): Result.006 file - promoters50/5668541
aaaaattc

SEQ ID NO: 199156 - DNA, 13 bp, Unknown
  misc_feature (1)..( 13): Result.006 file - promoters50/5668541
aaatgtttaatgt

SEQ ID NO: 199157 - DNA, 13 bp, Unknown
  misc_feature (1)..( 13): Result.006 file - promoters50/5668541
ttttgtttaatgt

SEQ ID NO: 199158 - DNA, 13 bp, Unknown
  misc_feature (1)..( 13): Result.006 file - promoters50/5668541
aaatattttttgt

SEQ ID NO: 199159 - DNA, 13 bp, Unknown
  misc_feature (1)..( 13): Result.006 file - promoters50/5668541
agttgttcaatat

SEQ ID NO: 199160 - DNA, 13 bp, Unknown
  misc_feature (1)..( 13): Result.006 file - promoters50/5668541
acgcatttaataa

SEQ ID NO: 199161 - DNA, 12 bp, Unknown
  misc_feature (1)..( 12): Result.006 file - promoters50/5668541
tttattttatac

SEQ ID NO: 199162 - DNA, 11 bp, Unknown
  misc_feature (1)..( 11): Result.006 file - promoters50/5668541
atataaaatct

SEQ ID NO: 199163 - DNA, 11 bp, Unknown
  misc_feature (1)..( 11): Result.006 file - promoters50/5668541
aaataaaaacc

SEQ ID NO: 199164 - DNA, 11 bp, Unknown
  misc_feature (1)..( 11): Result.006 file - promoters50/5668541
gaataaatttg

SEQ ID NO: 199165 - DNA, 11 bp, Unknown
  misc_feature (1)..( 11): Result.006 file - promoters50/5668541
gaataaacaat

SEQ ID NO: 199166 - DNA, 11 bp, Unknown
  misc_feature (1)..( 11): Result.006 file - promoters50/5668541
gaatatatttg

SEQ ID NO: 199167 - DNA, 11 bp, Unknown
  misc_feature (1)..( 11): Result.006 file - promoters50/5668541
cactatcttta

SEQ ID NO: 199168 - DNA, 14 bp, Unknown
  misc_feature (1)..( 14): Result.006 file - promoters50/5668541
atatttatttaaaa

SEQ ID NO: 199169 - DNA, 14 bp, Unknown
  misc_feature (1)..( 14): Result.006 file - promoters50/5668541
ttttgggtttgaaa

SEQ ID NO: 199170 - DNA, 14 bp, Unknown
  misc_feature (1)..( 14): Result.006 file - promoters50/5668541
gaatatatttgaaa

SEQ ID NO: 199171 - DNA, 14 bp, Unknown
  misc_feature (1)..( 14): Result.006 file - promoters50/5668541
gaataaatttgttg

SEQ ID NO: 199172 - DNA, 14 bp, Unknown
  misc_feature (1)..( 14): Result.006 file - promoters50/5668541
tcttatcttttttt

SEQ ID NO: 199173 - DNA, 14 bp, Unknown
  misc_feature (1)..( 14): Result.006 file - promoters50/5668541
cactatctttagga

SEQ ID NO: 199174 - DNA, 13 bp, Unknown
  misc_feature (1)..( 13): Result.006 file - promoters50/5668541
ttgaatttttttg

SEQ ID NO: 199175 - DNA, 13 bp, Unknown
  misc_feature (1)..( 13): Result.006 file - promoters50/5668541
atctctttgtttc

SEQ ID NO: 199176 - DNA, 13 bp, Unknown
  misc_feature (1)..( 13): Result.006 file - promoters50/5668541
aaatattttttgt

SEQ ID NO: 199177 - DNA, 13 bp, Unknown
  misc_feature (1)..( 13): Result.006 file - promoters50/5668541
atcttttttttga

SEQ ID NO: 199178 - DNA, 13 bp, Unknown
  misc_feature (1)..( 13): Result.006 file - promoters50/5668541
gttgactttttct

SEQ ID NO: 199179 - DNA, 13 bp, Unknown
  misc_feature (1)..( 13): Result.006 file - promoters50/5668541
tctaatttgattc

SEQ ID NO: 199180 - DNA, 14 bp, Unknown
  misc_feature (1)..( 14): Result.006 file - promoters50/5668541
gcgtatatttattt

SEQ ID NO: 199181 - DNA, 14 bp, Unknown
  misc_feature (1)..( 14): Result.006 file - promoters50/5668541
gaatatatttgaaa

SEQ ID NO: 199182 - DNA, 14 bp, Unknown
  misc_feature (1)..( 14): Result.006 file - promoters50/5668541
tcttatcttttttt

SEQ ID NO: 199183 - DNA, 14 bp, Unknown
  misc_feature (1)..( 14): Result.006 file - promoters50/5668541
cactatctttagga

SEQ ID NO: 199184 - DNA, 14 bp, Unknown
  misc_feature (1)..( 14): Result.006 file - promoters50/5668541
aaatttctctagat

SEQ ID NO: 199185 - DNA, 14 bp, Unknown
  misc_feature (1)..( 14): Result.006 file - promoters50/5668547
gaataaatttgttg

SEQ ID NO: 199186 - DNA, 7 bp, Unknown
  misc_feature (1)..( 7): Result.006 file - promoters50/5668547
acgtgga

SEQ ID NO: 199187 - DNA, 7 bp, Unknown
  misc_feature (1)..( 7): Result.006 file - promoters50/5668547
ccgtgga

SEQ ID NO: 199188 - DNA, 7 bp, Unknown
  misc_feature (1)..( 7): Result.006 file - promoters50/5668547
acgtggc

SEQ ID NO: 199189 - DNA, 7 bp, Unknown
  misc_feature (1)..( 7): Result.006 file - promoters50/5668547
gctgaaa

SEQ ID NO: 199190 - DNA, 7 bp, Unknown
  misc_feature (1)..( 7): Result.006 file - promoters50/5668547
gctaaaa

SEQ ID NO: 199191 - DNA, 7 bp, Unknown
  misc_feature (1)..( 7): Result.006 file - promoters50/5668547
tctgaaa

SEQ ID NO: 199192 - DNA, 9 bp, Unknown
  misc_feature (1)..( 9): Result.006 file - promoters50/5668547
ttttccttc

SEQ ID NO: 199193 - DNA, 9 bp, Unknown
  misc_feature (1)..( 9): Result.006 file - promoters50/5668547
tttttcttc

SEQ ID NO: 199194 - DNA, 9 bp, Unknown
  misc_feature (1)..( 9): Result.006 file - promoters50/5668547
cgtttcttt

SEQ ID NO: 199195 - DNA, 8 bp, Unknown
  misc_feature (1)..( 8): Result.006 file - promoters50/5668547
cgttgcta

SEQ ID NO: 199196 - DNA, 8 bp, Unknown
  misc_feature (1)..( 8): Result.006 file - promoters50/5668547
tgtttcta

SEQ ID NO: 199197 - DNA, 8 bp, Unknown
  misc_feature (1)..( 8): Result.006 file - promoters50/5668547
tgtctctc

SEQ ID NO: 199198 - DNA, 9 bp, Unknown
  misc_feature (1)..( 9): Result.006 file - promoters50/5668547
gtgtcctct

SEQ ID NO: 199199 - DNA, 9 bp, Unknown
  misc_feature (1)..( 9): Result.006 file - promoters50/5668547
gtgtgctct

SEQ ID NO: 199200 - DNA, 9 bp, Unknown
  misc_feature (1)..( 9): Result.006 file - promoters50/5668547
tcttcctct

SEQ ID NO: 199201 - DNA, 10 bp, Unknown
  misc_feature (1)..( 10): Result.006 file - promoters50/5668547
ttgtggctga

SEQ ID NO: 199202 - DNA, 10 bp, Unknown
  misc_feature (1)..( 10): Result.006 file - promoters50/5668547
atgtgggtga

SEQ ID NO: 199203 - DNA, 10 bp, Unknown
  misc_feature (1)..( 10): Result.006 file - promoters50/5668566
atgtggtcat

SEQ ID NO: 199204 - DNA, 13 bp, Unknown
  misc_feature (1)..( 13): Result.006 file - promoters50/5668566
gaccttttttaat

SEQ ID NO: 199205 - DNA, 13 bp, Unknown
  misc_feature (1)..( 13): Result.006 file - promoters50/5668566
ttcctttcttaat

SEQ ID NO: 199206 - DNA, 13 bp, Unknown
  misc_feature (1)..( 13): Result.006 file - promoters50/5668592
ttcgtttccttaa

SEQ ID NO: 199207 - DNA, 8 bp, Unknown
  misc_feature (1)..( 8): Result.006 file - promoters50/5668592
attttgag

SEQ ID NO: 199208 - DNA, 8 bp, Unknown
  misc_feature (1)..( 8): Result.006 file - promoters50/5668592
attatgat

SEQ ID NO: 199209 - DNA, 8 bp, Unknown
  misc_feature (1)..( 8): Result.006 file - promoters50/5668592
ttttcgag

SEQ ID NO: 199210 - DNA, 7 bp, Unknown
  misc_feature (1)..( 7): Result.006 file - promoters50/5668592
tgtttcg

SEQ ID NO: 199211 - DNA, 7 bp, Unknown
  misc_feature (1)..( 7): Result.006 file - promoters50/5668592
tgtttca

SEQ ID NO: 199212 - DNA, 7 bp, Unknown
  misc_feature (1)..( 7): Result.006 file - promoters50/5668629
cgtttcg

SEQ ID NO: 199213 - DNA, 17 bp, Unknown
  misc_feature (1)..( 17): Result.006 file - promoters50/5668629
gacaatttgaaacaata

SEQ ID NO: 199214 - DNA, 17 bp, Unknown
  misc_feature (1)..( 17): Result.006 file - promoters50/5668629
tttttttttaaaaccac

SEQ ID NO: 199215 - DNA, 17 bp, Unknown
  misc_feature (1)..( 17): Result.006 file - promoters50/5668629
agggtttttatacgtta

SEQ ID NO: 199216 - DNA, 17 bp, Unknown
  misc_feature (1)..( 17): Result.006 file - promoters50/5668629
ccaaatttcatacaaaa

SEQ ID NO: 199217 - DNA, 17 bp, Unknown
  misc_feature (1)..( 17): Result.006 file - promoters50/5668629
gggatttttgtaacgca

SEQ ID NO: 199218 - DNA, 17 bp, Unknown
  misc_feature (1)..( 17): Result.006 file - promoters50/5668629
aaaaaaagaaaacttca

SEQ ID NO: 199219 - DNA, 12 bp, Unknown
  misc_feature (1)..( 12): Result.006 file - promoters50/5668629
cttaattttcta

SEQ ID NO: 199220 - DNA, 12 bp, Unknown
  misc_feature (1)..( 12): Result.006 file - promoters50/5668629
atcaattttata

SEQ ID NO: 199221 - DNA, 12 bp, Unknown
  misc_feature (1)..( 12): Result.006 file - promoters50/5668629
attaatttttat

SEQ ID NO: 199222 - DNA, 12 bp, Unknown
  misc_feature (1)..( 12): Result.006 file - promoters50/5668629
ttcaatcttatt

SEQ ID NO: 199223 - DNA, 12 bp, Unknown
  misc_feature (1)..( 12): Result.006 file - promoters50/5668629
tctaatttcaca

SEQ ID NO: 199224 - DNA, 12 bp, Unknown
  misc_feature (1)..( 12): Result.006 file - promoters50/5668629
gtaaatcatatt

SEQ ID NO: 199225 - DNA, 14 bp, Unknown
  misc_feature (1)..( 14): Result.006 file - promoters50/5668629
gttttagtttaaag

SEQ ID NO: 199226 - DNA, 14 bp, Unknown
  misc_feature (1)..( 14): Result.006 file - promoters50/5668629
ttaatagtttaaag

SEQ ID NO: 199227 - DNA, 14 bp, Unknown
  misc_feature (1)..( 14): Result.006 file - promoters50/5668629
gtttttgtttttgt

SEQ ID NO: 199228 - DNA, 14 bp, Unknown
  misc_feature (1)..( 14): Result.006 file - promoters50/5668629
aattttgtatctaa

SEQ ID NO: 199229 - DNA, 14 bp, Unknown
  misc_feature (1)..( 14): Result.006 file - promoters50/5668629
aattttgtgtgggc

SEQ ID NO: 199230 - DNA, 14 bp, Unknown
  misc_feature (1)..( 14): Result.006 file - promoters50/5668629
tattgtgtacagtt

SEQ ID NO: 199231 - DNA, 14 bp, Unknown
  misc_feature (1)..( 14): Result.006 file - promoters50/5668629
ccatgtgtctacta

SEQ ID NO: 199232 - DNA, 11 bp, Unknown
  misc_feature (1)..( 11): Result.006 file - promoters50/5668629
aatatcttaaa

SEQ ID NO: 199233 - DNA, 11 bp, Unknown
  misc_feature (1)..( 11): Result.006 file - promoters50/5668629
tcaatcttatt

SEQ ID NO: 199234 - DNA, 11 bp, Unknown
  misc_feature (1)..( 11): Result.006 file - promoters50/5668629
tcaattttata

SEQ ID NO: 199235 - DNA, 11 bp, Unknown
  misc_feature (1)..( 11): Result.006 file - promoters50/5668629
taatttttatt

SEQ ID NO: 199236 - DNA, 11 bp, Unknown
  misc_feature (1)..( 11): Result.006 file - promoters50/5668629
aaattctaatt

SEQ ID NO: 199237 - DNA, 11 bp, Unknown
  misc_feature (1)..( 11): Result.006 file - promoters50/5668629
taaatcatatt

SEQ ID NO: 199238 - DNA, 10 bp, Unknown
  misc_feature (1)..( 10): Result.006 file - promoters50/5668629
gacgaaaaag

SEQ ID NO: 199239 - DNA, 10 bp, Unknown
  misc_feature (1)..( 10): Result.006 file - promoters50/5668629
gaccaaaaaa

SEQ ID NO: 199240 - DNA, 10 bp, Unknown
  misc_feature (1)..( 10): Result.006 file - promoters50/5668629
cgtgaataag

SEQ ID NO: 199241 - DNA, 7 bp, Unknown
  misc_feature (1)..( 7): Result.006 file - promoters50/5668629
taaaaag

SEQ ID NO: 199242 - DNA, 10 bp, Unknown
  misc_feature (1)..( 10): Result.006 file - promoters50/5668629
gaccaagaat

SEQ ID NO: 199243 - DNA, 10 bp, Unknown
  misc_feature (1)..( 10): Result.006 file - promoters50/5668720
aatgaatatt

SEQ ID NO: 199244 - DNA, 11 bp, Unknown
  misc_feature (1)..( 11): Result.006 file - promoters50/5668720
tacaataatac

SEQ ID NO: 199245 - DNA, 11 bp, Unknown
  misc_feature (1)..( 11): Result.006 file - promoters50/5668720
ttcaaaaatac

SEQ ID NO: 199246 - DNA, 11 bp, Unknown
  misc_feature (1)..( 11): Result.006 file - promoters50/5668720
aaaaattatac

SEQ ID NO: 199247 - DNA, 11 bp, Unknown
  misc_feature (1)..( 11): Result.006 file - promoters50/5668720
ttctaaaatct

SEQ ID NO: 199248 - DNA, 11 bp, Unknown
  misc_feature (1)..( 11): Result.006 file - promoters50/5668720
tttaaaaactt

SEQ ID NO: 199249 - DNA, 11 bp, Unknown
  misc_feature (1)..( 11): Result.006 file - promoters50/5668748
aaacaaaacta

SEQ ID NO: 199250 - DNA, 11 bp, Unknown
  misc_feature (1)..( 11): Result.006 file - promoters50/5668748
tttcaaaatat

SEQ ID NO: 199251 - DNA, 11 bp, Unknown
  misc_feature (1)..( 11): Result.006 file - promoters50/5668748
gaaaaaaatac

SEQ ID NO: 199252 - DNA, 11 bp, Unknown
  misc_feature (1)..( 11): Result.006 file - promoters50/5668748
actaaaaatat

SEQ ID NO: 199253 - DNA, 11 bp, Unknown
  misc_feature (1)..( 11): Result.006 file - promoters50/5668748
aaccaaaatga

SEQ ID NO: 199254 - DNA, 11 bp, Unknown
  misc_feature (1)..( 11): Result.006 file - promoters50/5668748
tttcaagatat

SEQ ID NO: 199255 - DNA, 11 bp, Unknown
  misc_feature (1)..( 11): Result.006 file - promoters50/5668748
ataaaaaataa

SEQ ID NO: 199256 - DNA, 12 bp, Unknown
  misc_feature (1)..( 12): Result.006 file - promoters50/5668748
tatttttccttt

SEQ ID NO: 199257 - DNA, 12 bp, Unknown
  misc_feature (1)..( 12): Result.006 file - promoters50/5668748
aatttttcctaa

SEQ ID NO: 199258 - DNA, 12 bp, Unknown
  misc_feature (1)..( 12): Result.006 file - promoters50/5668748
tatatttatttg

SEQ ID NO: 199259 - DNA, 12 bp, Unknown
  misc_feature (1)..( 12): Result.006 file - promoters50/5668748
acattttccttt

SEQ ID NO: 199260 - DNA, 12 bp, Unknown
  misc_feature (1)..( 12): Result.006 file - promoters50/5668748
gattattctttt

SEQ ID NO: 199261 - DNA, 12 bp, Unknown
  misc_feature (1)..( 12): Result.006 file - promoters50/5668748
taattttagggt

SEQ ID NO: 199262 - DNA, 12 bp, Unknown
  misc_feature (1)..( 12): Result.006 file - promoters50/5668748
taattttaattt

SEQ ID NO: 199263 - DNA, 14 bp, Unknown
  misc_feature (1)..( 14): Result.006 file - promoters50/5668748
aagataaaacttta

SEQ ID NO: 199264 - DNA, 14 bp, Unknown
  misc_feature (1)..( 14): Result.006 file - promoters50/5668748
ctgataaaatgcta

SEQ ID NO: 199265 - DNA, 14 bp, Unknown
  misc_feature (1)..( 14): Result.006 file - promoters50/5668748
agtataaaatactt

SEQ ID NO: 199266 - DNA, 14 bp, Unknown
  misc_feature (1)..( 14): Result.006 file - promoters50/5668748
tcgatagaacatta

SEQ ID NO: 199267 - DNA, 14 bp, Unknown
  misc_feature (1)..( 14): Result.006 file - promoters50/5668748
aagataattaaact

SEQ ID NO: 199268 - DNA, 14 bp, Unknown
  misc_feature (1)..( 14): Result.006 file - promoters50/5668748
agtatataatttta

SEQ ID NO: 199269 - DNA, 14 bp, Unknown
  misc_feature (1)..( 14): Result.006 file - promoters50/5668748
acaataatttaggt

SEQ ID NO: 199270 - DNA, 14 bp, Unknown
  misc_feature (1)..( 14): Result.006 file - promoters50/5668748
tacatagaaatcaa

SEQ ID NO: 199271 - DNA, 15 bp, Unknown
  misc_feature (1)..( 15): Result.006 file - promoters50/5668748
aaagaaaaatgacat

SEQ ID NO: 199272 - DNA, 15 bp, Unknown
  misc_feature (1)..( 15): Result.006 file - promoters50/5668748
ctgataaaatgctaa

SEQ ID NO: 199273 - DNA, 15 bp, Unknown
  misc_feature (1)..( 15): Result.006 file - promoters50/5668748
aactaaaaatatatt

SEQ ID NO: 199274 - DNA, 15 bp, Unknown
  misc_feature (1)..( 15): Result.006 file - promoters50/5668748
gaaatcaaatgacca

SEQ ID NO: 199275 - DNA, 15 bp, Unknown
  misc_feature (1)..( 15): Result.006 file - promoters50/5668748
agtataaaatacttt

SEQ ID NO: 199276 - DNA, 15 bp, Unknown
  misc_feature (1)..( 15): Result.006 file - promoters50/5668748
acttttaaatacttt

SEQ ID NO: 199277 - DNA, 15 bp, Unknown
  misc_feature (1)..( 15): Result.006 file - promoters50/5668748
agtatataattttag

SEQ ID NO: 199278 - DNA, 15 bp, Unknown
  misc_feature (1)..( 15): Result.006 file - promoters50/5668748
ccacaataatttagg

SEQ ID NO: 199279 - DNA, 13 bp, Unknown
  misc_feature (1)..( 13): Result.006 file - promoters50/5668748
acgtaattacatg

SEQ ID NO: 199280 - DNA, 13 bp, Unknown
  misc_feature (1)..( 13): Result.006 file - promoters50/5668748
agataagtaccta

SEQ ID NO: 199281 - DNA, 13 bp, Unknown
  misc_feature (1)..( 13): Result.006 file - promoters50/5668748
acggaattcctcc

SEQ ID NO: 199282 - DNA, 13 bp, Unknown
  misc_feature (1)..( 13): Result.006 file - promoters50/5668748
agaaaagtgagtt

SEQ ID NO: 199283 - DNA, 13 bp, Unknown
  misc_feature (1)..( 13): Result.006 file - promoters50/5668748
aaagaatttctcc

SEQ ID NO: 199284 - DNA, 13 bp, Unknown
  misc_feature (1)..( 13): Result.006 file - promoters50/5668748
agaaaaaacactt

SEQ ID NO: 199285 - DNA, 14 bp, Unknown
  misc_feature (1)..( 14): Result.006 file - promoters50/5668748
gataaaactttatc

SEQ ID NO: 199286 - DNA, 14 bp, Unknown
  misc_feature (1)..( 14): Result.006 file - promoters50/5668748
taaaatactttatc

SEQ ID NO: 199287 - DNA, 14 bp, Unknown
  misc_feature (1)..( 14): Result.006 file - promoters50/5668748
gatagaacattaat

SEQ ID NO: 199288 - DNA, 14 bp, Unknown
  misc_feature (1)..( 14): Result.006 file - promoters50/5668748
ttcacaaattttgt

SEQ ID NO: 199289 - DNA, 14 bp, Unknown
  misc_feature (1)..( 14): Result.006 file - promoters50/5668748
aattaaacttttaa

SEQ ID NO: 199290 - DNA, 14 bp, Unknown
  misc_feature (1)..( 14): Result.006 file - promoters50/5668748
gtatataattttag

SEQ ID NO: 199291 - DNA, 14 bp, Unknown
  misc_feature (1)..( 14): Result.006 file - promoters50/5668748
catagaaatcaaat

SEQ ID NO: 199292 - DNA, 16 bp, Unknown
  misc_feature (1)..( 16): Result.006 file - promoters50/5668748
ttaaaaaacatgtcgg

SEQ ID NO: 199293 - DNA, 16 bp, Unknown
  misc_feature (1)..( 16): Result.006 file - promoters50/5668748
ttaaaaagctaaaaca

SEQ ID NO: 199294 - DNA, 16 bp, Unknown
  misc_feature (1)..( 16): Result.006 file - promoters50/5668748
acaaaaaatatctcat

SEQ ID NO: 199295 - DNA, 16 bp, Unknown
  misc_feature (1)..( 16): Result.006 file - promoters50/5668748
ctaaacaacatatttc

SEQ ID NO: 199296 - DNA, 16 bp, Unknown
  misc_feature (1)..( 16): Result.006 file - promoters50/5668748
ctaaaccggaagtttg

SEQ ID NO: 199297 - DNA, 16 bp, Unknown
  misc_feature (1)..( 16): Result.006 file - promoters50/5668748
atacaaagaatttctc

SEQ ID NO: 199298 - DNA, 10 bp, Unknown
  misc_feature (1)..( 10): Result.006 file - promoters50/5668748
tttatatacc

SEQ ID NO: 199299 - DNA, 10 bp, Unknown
  misc_feature (1)..( 10): Result.006 file - promoters50/5668748
tatatataaa

SEQ ID NO: 199300 - DNA, 10 bp, Unknown
  misc_feature (1)..( 10): Result.006 file - promoters50/5668748
tatatatatc

SEQ ID NO: 199301 - DNA, 10 bp, Unknown
  misc_feature (1)..( 10): Result.006 file - promoters50/5668748
tctataaata

SEQ ID NO: 199302 - DNA, 10 bp, Unknown
  misc_feature (1)..( 10): Result.006 file - promoters50/5668748
tctataaaaa

SEQ ID NO: 199303 - DNA, 10 bp, Unknown
  misc_feature (1)..( 10): Result.006 file - promoters50/5668748
actataaata

SEQ ID NO: 199304 - DNA, 10 bp, Unknown
  misc_feature (1)..( 10): Result.006 file - promoters50/5668748
aatataaata

SEQ ID NO: 199305 - DNA, 14 bp, Unknown
  misc_feature (1)..( 14): Result.006 file - promoters50/5668748
catttttaatcaaa

SEQ ID NO: 199306 - DNA, 14 bp, Unknown
  misc_feature (1)..( 14): Result.006 file - promoters50/5668748
tatttgtaatcgat

SEQ ID NO: 199307 - DNA, 14 bp, Unknown
  misc_feature (1)..( 14): Result.006 file - promoters50/5668748
cattttcctttatg

SEQ ID NO: 199308 - DNA, 14 bp, Unknown
  misc_feature (1)..( 14): Result.006 file - promoters50/5668748
aattattaaagtat

SEQ ID NO: 199309 - DNA, 14 bp, Unknown
  misc_feature (1)..( 14): Result.006 file - promoters50/5668748
catgagtactcgat

SEQ ID NO: 199310 - DNA, 14 bp, Unknown
  misc_feature (1)..( 14): Result.006 file - promoters50/5668748
gattattctttttc

SEQ ID NO: 199311 - DNA, 21 bp, Unknown
  misc_feature (1)..( 21): Result.006 file - promoters50/5668748
acagtttacttatcattttca

SEQ ID NO: 199312 - DNA, 21 bp, Unknown
  misc_feature (1)..( 21): Result.006 file - promoters50/5668748
acaatttacgtattattttca

SEQ ID NO: 199313 - DNA, 21 bp, Unknown
  misc_feature (1)..( 21): Result.006 file - promoters50/5668748
atttgttacatatacattttg

SEQ ID NO: 199314 - DNA, 21 bp, Unknown
  misc_feature (1)..( 21): Result.006 file - promoters50/5668748
ggaaccatagtattatctagt

SEQ ID NO: 199315 - DNA, 21 bp, Unknown
  misc_feature (1)..( 21): Result.006 file - promoters50/5668748
aaacacagtatataattttag

SEQ ID NO: 199316 - DNA, 22 bp, Unknown
  misc_feature (1)..( 22): Result.006 file - promoters50/5668788
aaaataatcatatgcatttatg

SEQ ID NO: 199317 - DNA, 10 bp, Unknown
  misc_feature (1)..( 10): Result.006 file - promoters50/5668788
agagaaaaat

SEQ ID NO: 199318 - DNA, 10 bp, Unknown
  misc_feature (1)..( 10): Result.006 file - promoters50/5668788
agagcaaaag

SEQ ID NO: 199319 - DNA, 10 bp, Unknown
  misc_feature (1)..( 10): Result.006 file - promoters50/5668797
aacacaaaag

SEQ ID NO: 199320 - DNA, 12 bp, Unknown
  misc_feature (1)..( 12): Result.006 file - promoters50/5668797
ctatatatgagc

SEQ ID NO: 199321 - DNA, 12 bp, Unknown
  misc_feature (1)..( 12): Result.006 file - promoters50/5668797
ttatataatgaa

SEQ ID NO: 199322 - DNA, 12 bp, Unknown
  misc_feature (1)..( 12): Result.006 file - promoters50/5668797
ctatttattagc

SEQ ID NO: 199323 - DNA, 22 bp, Unknown
  misc_feature (1)..( 22): Result.006 file - promoters50/5668797
caaaaaaaaaacaaattgattt

SEQ ID NO: 199324 - DNA, 22 bp, Unknown
  misc_feature (1)..( 22): Result.006 file - promoters50/5668797
caaagaaaaaataaatttattt

SEQ ID NO: 199325 - DNA, 22 bp, Unknown
  misc_feature (1)..( 22): Result.006 file - promoters50/5668800
atttgaaaaaattcacggactc

SEQ ID NO: 199326 - DNA, 9 bp, Unknown
  misc_feature (1)..( 9): Result.006 file - promoters50/5668800
aaacttttt

SEQ ID NO: 199327 - DNA, 9 bp, Unknown
  misc_feature (1)..( 9): Result.006 file - promoters50/5668800
taacatttt

SEQ ID NO: 199328 - DNA, 9 bp, Unknown
  misc_feature (1)..( 9): Result.006 file - promoters50/5668800
taatattca

SEQ ID NO: 199329 - DNA, 11 bp, Unknown
  misc_feature (1)..( 11): Result.006 file - promoters50/5668800
atataaacaaa

SEQ ID NO: 199330 - DNA, 11 bp, Unknown
  misc_feature (1)..( 11): Result.006 file - promoters50/5668800
atataatcaaa

SEQ ID NO: 199331 - DNA, 11 bp, Unknown
  misc_feature (1)..( 11): Result.006 file - promoters50/5668800
aaaaaaataaa

SEQ ID NO: 199332 - DNA, 8 bp, Unknown
  misc_feature (1)..( 8): Result.006 file - promoters50/5668800
gataaaat

SEQ ID NO: 199333 - DNA, 8 bp, Unknown
  misc_feature (1)..( 8): Result.006 file - promoters50/5668800
aataaaat

SEQ ID NO: 199334 - DNA, 8 bp, Unknown
  misc_feature (1)..( 8): Result.006 file - promoters50/5668800
gataaatt

SEQ ID NO: 199335 - DNA, 8 bp, Unknown
  misc_feature (1)..( 8): Result.006 file - promoters50/5668800
gatgaatc

SEQ ID NO: 199336 - DNA, 11 bp, Unknown
  misc_feature (1)..( 11): Result.006 file - promoters50/5668800
tcttattttga

SEQ ID NO: 199337 - DNA, 11 bp, Unknown
  misc_feature (1)..( 11): Result.006 file - promoters50/5668800
tctgattttgt

SEQ ID NO: 199338 - DNA, 11 bp, Unknown
  misc_feature (1)..( 11): Result.006 file - promoters50/5668800
gattcttttga

SEQ ID NO: 199339 - DNA, 22 bp, Unknown
  misc_feature (1)..( 22): Result.006 file - promoters50/5668800
atcacaattaagatgtatctta

SEQ ID NO: 199340 - DNA, 22 bp, Unknown
  misc_feature (1)..( 22): Result.006 file - promoters50/5668800
tcttttctgattttgtttctca

SEQ ID NO: 199341 - DNA, 22 bp, Unknown
  misc_feature (1)..( 22): Result.006 file - promoters50/5668800
tcttttctgatattgtttctca

SEQ ID NO: 199342 - DNA, 6 bp, Unknown
  misc_feature (1)..( 6): Result.006 file - promoters50/5668800
atagga

SEQ ID NO: 199343 - DNA, 6 bp, Unknown
  misc_feature (1)..( 6): Result.006 file - promoters50/5668800
atagga

SEQ ID NO: 199344 - DNA, 6 bp, Unknown
  misc_feature (1)..( 6): Result.006 file - promoters50/5668800
atagga

SEQ ID NO: 199345 - DNA, 8 bp, Unknown
  misc_feature (1)..( 8): Result.006 file - promoters50/5668800
ataaaatt

SEQ ID NO: 199346 - DNA, 8 bp, Unknown
  misc_feature (1)..( 8): Result.006 file - promoters50/5668800
ataatatt

SEQ ID NO: 199347 - DNA, 8 bp, Unknown
  misc_feature (1)..( 8): Result.006 file - promoters50/5668800
ataaaata

SEQ ID NO: 199348 - DNA, 12 bp, Unknown
  misc_feature (1)..( 12): Result.006 file - promoters50/5668800
aaaaattaaaaa

SEQ ID NO: 199349 - DNA, 12 bp, Unknown
  misc_feature (1)..( 12): Result.006 file - promoters50/5668800
aaaaaataaaaa

SEQ ID NO: 199350 - DNA, 12 bp, Unknown
  misc_feature (1)..( 12): Result.006 file - promoters50/5668800
ctcaaataaaat

SEQ ID NO: 199351 - DNA, 7 bp, Unknown
  misc_feature (1)..( 7): Result.006 file - promoters50/5668800
aaatata

SEQ ID NO: 199352 - DNA, 7 bp, Unknown
  misc_feature (1)..( 7): Result.006 file - promoters50/5668800
aaatata

SEQ ID NO: 199353 - DNA, 7 bp, Unknown
  misc_feature (1)..( 7): Result.006 file - promoters50/5668800
aaatata

SEQ ID NO: 199354 - DNA, 10 bp, Unknown
  misc_feature (1)..( 10): Result.006 file - promoters50/5668800
aaaaaataat

SEQ ID NO: 199355 - DNA, 10 bp, Unknown
  misc_feature (1)..( 10): Result.006 file - promoters50/5668800
aaaaaataaa

SEQ ID NO: 199356 - DNA, 12 bp, Unknown
  misc_feature (1)..( 12): Result.006 file - promoters50/5668800
aatcaaatgaaa

SEQ ID NO: 199357 - DNA, 7 bp, Unknown
  misc_feature (1)..( 7): Result.006 file - promoters50/5668800
agttgct

SEQ ID NO: 199358 - DNA, 7 bp, Unknown
  misc_feature (1)..( 7): Result.006 file - promoters50/5668800
agttgct

SEQ ID NO: 199359 - DNA, 7 bp, Unknown
  misc_feature (1)..( 7): Result.006 file - promoters50/5668800
agttgct

SEQ ID NO: 199360 - DNA, 9 bp, Unknown
  misc_feature (1)..( 9): Result.006 file - promoters50/5668800
tacaaatct

SEQ ID NO: 199361 - DNA, 9 bp, Unknown
  misc_feature (1)..( 9): Result.006 file - promoters50/5668800
ctcaaatct

SEQ ID NO: 199362 - DNA, 9 bp, Unknown
  misc_feature (1)..( 9): Result.006 file - promoters50/5668800
ctcaaataa

SEQ ID NO: 199363 - DNA, 8 bp, Unknown
  misc_feature (1)..( 8): Result.006 file - promoters50/5668800
ttttaata

SEQ ID NO: 199364 - DNA, 8 bp, Unknown
  misc_feature (1)..( 8): Result.006 file - promoters50/5668800
tttcaatg

SEQ ID NO: 199365 - DNA, 8 bp, Unknown
  misc_feature (1)..( 8): Result.006 file - promoters50/5668807
attcaatg

SEQ ID NO: 199366 - DNA, 13 bp, Unknown
  misc_feature (1)..( 13): Result.006 file - promoters50/5668807
aataatttaacat

SEQ ID NO: 199367 - DNA, 13 bp, Unknown
  misc_feature (1)..( 13): Result.006 file - promoters50/5668807
tactatttatcat

SEQ ID NO: 199368 - DNA, 13 bp, Unknown
  misc_feature (1)..( 13): Result.006 file - promoters50/5668807
tattatttttttt

SEQ ID NO: 199369 - DNA, 8 bp, Unknown
  misc_feature (1)..( 8): Result.006 file - promoters50/5668807
ctttaaaa

SEQ ID NO: 199370 - DNA, 8 bp, Unknown
  misc_feature (1)..( 8): Result.006 file - promoters50/5668807
cttcaaaa

SEQ ID NO: 199371 - DNA, 8 bp, Unknown
  misc_feature (1)..( 8): Result.006 file - promoters50/5668807
ctttaatg

SEQ ID NO: 199372 - DNA, 8 bp, Unknown
  misc_feature (1)..( 8): Result.006 file - promoters50/5668807
tttcttaa

SEQ ID NO: 199373 - DNA, 8 bp, Unknown
  misc_feature (1)..( 8): Result.006 file - promoters50/5668807
tttgttaa

SEQ ID NO: 199374 - DNA, 8 bp, Unknown
  misc_feature (1)..( 8): Result.006 file - promoters50/5668814
tttcttac

SEQ ID NO: 199375 - DNA, 7 bp, Unknown
  misc_feature (1)..( 7): Result.006 file - promoters50/5668814
aaacttt

SEQ ID NO: 199376 - DNA, 7 bp, Unknown
  misc_feature (1)..( 7): Result.006 file - promoters50/5668814
gaacttt

SEQ ID NO: 199377 - DNA, 7 bp, Unknown
  misc_feature (1)..( 7): Result.006 file - promoters50/5668814
gaactta

SEQ ID NO: 199378 - DNA, 12 bp, Unknown
  misc_feature (1)..( 12): Result.006 file - promoters50/5668814
tattggaaaata

SEQ ID NO: 199379 - DNA, 12 bp, Unknown
  misc_feature (1)..( 12): Result.006 file - promoters50/5668814
ctttggaataat

SEQ ID NO: 199380 - DNA, 12 bp, Unknown
  misc_feature (1)..( 12): Result.006 file - promoters50/5668818
tataggaagata

SEQ ID NO: 199381 - DNA, 11 bp, Unknown
  misc_feature (1)..( 11): Result.006 file - promoters50/5668818
ttaaggattaa

SEQ ID NO: 199382 - DNA, 11 bp, Unknown
  misc_feature (1)..( 11): Result.006 file - promoters50/5668818
ttaagtattat

SEQ ID NO: 199383 - DNA, 11 bp, Unknown
  misc_feature (1)..( 11): Result.006 file - promoters50/5668818
ttctagattaa

SEQ ID NO: 199384 - DNA, 11 bp, Unknown
  misc_feature (1)..( 11): Result.006 file - promoters50/5668818
ctaaagatttt

SEQ ID NO: 199385 - DNA, 11 bp, Unknown
  misc_feature (1)..( 11): Result.006 file - promoters50/5668818
ataactattta

SEQ ID NO: 199386 - DNA, 12 bp, Unknown
  misc_feature (1)..( 12): Result.006 file - promoters50/5668818
taccctaattaa

SEQ ID NO: 199387 - DNA, 12 bp, Unknown
  misc_feature (1)..( 12): Result.006 file - promoters50/5668818
aacactaaagac

SEQ ID NO: 199388 - DNA, 12 bp, Unknown
  misc_feature (1)..( 12): Result.006 file - promoters50/5668818
aattaaacaaag

SEQ ID NO: 199389 - DNA, 12 bp, Unknown
  misc_feature (1)..( 12): Result.006 file - promoters50/5668818
atttaaacgtaa

SEQ ID NO: 199390 - DNA, 12 bp, Unknown
  misc_feature (1)..( 12): Result.006 file - promoters50/5668818
aatcaaaaaaag

SEQ ID NO: 199391 - DNA, 12 bp, Unknown
  misc_feature (1)..( 12): Result.006 file - promoters50/5668818
aataaaatatgt

SEQ ID NO: 199392 - DNA, 12 bp, Unknown
  misc_feature (1)..( 12): Result.006 file - promoters50/5668818
aataaaaaaaaa

SEQ ID NO: 199393 - DNA, 12 bp, Unknown
  misc_feature (1)..( 12): Result.006 file - promoters50/5668818
gttaaaaattgt

SEQ ID NO: 199394 - DNA, 10 bp, Unknown
  misc_feature (1)..( 10): Result.006 file - promoters50/5668818
taatatttaa

SEQ ID NO: 199395 - DNA, 10 bp, Unknown
  misc_feature (1)..( 10): Result.006 file - promoters50/5668818
caatattttt

SEQ ID NO: 199396 - DNA, 10 bp, Unknown
  misc_feature (1)..( 10): Result.006 file - promoters50/5668818
aattattttc

SEQ ID NO: 199397 - DNA, 10 bp, Unknown
  misc_feature (1)..( 10): Result.006 file - promoters50/5668818
caaaattact

SEQ ID NO: 199398 - DNA, 10 bp, Unknown
  misc_feature (1)..( 10): Result.006 file - promoters50/5668818
ttttatttca

SEQ ID NO: 199399 - DNA, 10 bp, Unknown
  misc_feature (1)..( 10): Result.006 file - promoters50/5668818
aaacataaaa

SEQ ID NO: 199400 - DNA, 9 bp, Unknown
  misc_feature (1)..( 9): Result.006 file - promoters50/5668818
tatttatca

SEQ ID NO: 199401 - DNA, 9 bp, Unknown
  misc_feature (1)..( 9): Result.006 file - promoters50/5668818
tatttaaaa

SEQ ID NO: 199402 - DNA, 9 bp, Unknown
  misc_feature (1)..( 9): Result.006 file - promoters50/5668818
aatttaata

SEQ ID NO: 199403 - DNA, 9 bp, Unknown
  misc_feature (1)..( 9): Result.006 file - promoters50/5668818
attttcata

SEQ ID NO: 199404 - DNA, 9 bp, Unknown
  misc_feature (1)..( 9): Result.006 file - promoters50/5668818
gattaaaaa

SEQ ID NO: 199405 - DNA, 9 bp, Unknown
  misc_feature (1)..( 9): Result.006 file - promoters50/5668828
cttttcagt

SEQ ID NO: 199406 - DNA, 9 bp, Unknown
  misc_feature (1)..( 9): Result.006 file - promoters50/5668828
tatcttttt

SEQ ID NO: 199407 - DNA, 9 bp, Unknown
  misc_feature (1)..( 9): Result.006 file - promoters50/5668828
ctccttttt

SEQ ID NO: 199408 - DNA, 9 bp, Unknown
  misc_feature (1)..( 9): Result.006 file - promoters50/5668828
tccctttca

SEQ ID NO: 199409 - DNA, 8 bp, Unknown
  misc_feature (1)..( 8): Result.006 file - promoters50/5668828
taatatat

SEQ ID NO: 199410 - DNA, 8 bp, Unknown
  misc_feature (1)..( 8): Result.006 file - promoters50/5668828
gaatctat

SEQ ID NO: 199411 - DNA, 8 bp, Unknown
  misc_feature (1)..( 8): Result.006 file - promoters50/5668828
gaatctag

SEQ ID NO: 199412 - DNA, 9 bp, Unknown
  misc_feature (1)..( 9): Result.006 file - promoters50/5668828
tcttgaatc

SEQ ID NO: 199413 - DNA, 9 bp, Unknown
  misc_feature (1)..( 9): Result.006 file - promoters50/5668828
tcttgatcc

SEQ ID NO: 199414 - DNA, 9 bp, Unknown
  misc_feature (1)..( 9): Result.006 file - promoters50/5668832
tcttggatc

SEQ ID NO: 199415 - DNA, 7 bp, Unknown
  misc_feature (1)..( 7): Result.006 file - promoters50/5668832
attataa

SEQ ID NO: 199416 - DNA, 7 bp, Unknown
  misc_feature (1)..( 7): Result.006 file - promoters50/5668832
attttaa

SEQ ID NO: 199417 - DNA, 7 bp, Unknown
  misc_feature (1)..( 7): Result.006 file - promoters50/5668832
tttttaa

SEQ ID NO: 199418 - DNA, 7 bp, Unknown
  misc_feature (1)..( 7): Result.006 file - promoters50/5668832
attttat

SEQ ID NO: 199419 - DNA, 8 bp, Unknown
  misc_feature (1)..( 8): Result.006 file - promoters50/5668832
ttttactt

SEQ ID NO: 199420 - DNA, 8 bp, Unknown
  misc_feature (1)..( 8): Result.006 file - promoters50/5668832
ttttgctt

SEQ ID NO: 199421 - DNA, 8 bp, Unknown
  misc_feature (1)..( 8): Result.006 file - promoters50/5668832
ttttcttt

SEQ ID NO: 199422 - DNA, 10 bp, Unknown
  misc_feature (1)..( 10): Result.006 file - promoters50/5668832
atttagacca

SEQ ID NO: 199423 - DNA, 10 bp, Unknown
  misc_feature (1)..( 10): Result.006 file - promoters50/5668832
tcgtagacca

SEQ ID NO: 199424 - DNA, 10 bp, Unknown
  misc_feature (1)..( 10): Result.006 file - promoters50/5668832
attttgacaa

SEQ ID NO: 199425 - DNA, 11 bp, Unknown
  misc_feature (1)..( 11): Result.006 file - promoters50/5668832
ttcgtttttcc

SEQ ID NO: 199426 - DNA, 11 bp, Unknown
  misc_feature (1)..( 11): Result.006 file - promoters50/5668832
ttcgttttttt

SEQ ID NO: 199427 - DNA, 11 bp, Unknown
  misc_feature (1)..( 11): Result.006 file - promoters50/5668832
acattttatcc

SEQ ID NO: 199428 - DNA, 12 bp, Unknown
  misc_feature (1)..( 12): Result.006 file - promoters50/5668832
tttaagtttttt

SEQ ID NO: 199429 - DNA, 12 bp, Unknown
  misc_feature (1)..( 12): Result.006 file - promoters50/5668832
attagatttttt

SEQ ID NO: 199430 - DNA, 12 bp, Unknown
  misc_feature (1)..( 12): Result.006 file - promoters50/5668832
attcgatctttt

SEQ ID NO: 199431 - DNA, 12 bp, Unknown
  misc_feature (1)..( 12): Result.006 file - promoters50/5668832
taaaaatcaaga

SEQ ID NO: 199432 - DNA, 12 bp, Unknown
  misc_feature (1)..( 12): Result.006 file - promoters50/5668832
taaaaactaaaa

SEQ ID NO: 199433 - DNA, 12 bp, Unknown
  misc_feature (1)..( 12): Result.006 file - promoters50/5668832
taataatcctta

SEQ ID NO: 199434 - DNA, 12 bp, Unknown
  misc_feature (1)..( 12): Result.006 file - promoters50/5668832
tcataatcctta

SEQ ID NO: 199435 - DNA, 6 bp, Unknown
  misc_feature (1)..( 6): Result.006 file - promoters50/5668832
attaga

SEQ ID NO: 199436 - DNA, 6 bp, Unknown
  misc_feature (1)..( 6): Result.006 file - promoters50/5668832
attaga

SEQ ID NO: 199437 - DNA, 6 bp, Unknown
  misc_feature (1)..( 6): Result.006 file - promoters50/5668832
attaga

SEQ ID NO: 199438 - DNA, 9 bp, Unknown
  misc_feature (1)..( 9): Result.006 file - promoters50/5668832
ttaaaaaaa

SEQ ID NO: 199439 - DNA, 9 bp, Unknown
  misc_feature (1)..( 9): Result.006 file - promoters50/5668832
ttataaaat

SEQ ID NO: 199440 - DNA, 9 bp, Unknown
  misc_feature (1)..( 9): Result.006 file - promoters50/5668832
ctaaactcc

SEQ ID NO: 199441 - DNA, 9 bp, Unknown
  misc_feature (1)..( 9): Result.006 file - promoters50/5668832
tttcaaaat

SEQ ID NO: 199442 - DNA, 9 bp, Unknown
  misc_feature (1)..( 9): Result.006 file - promoters50/5668832
tttgaaact

SEQ ID NO: 199443 - DNA, 9 bp, Unknown
  misc_feature (1)..( 9): Result.006 file - promoters50/5668832
ttttaaact

SEQ ID NO: 199444 - DNA, 7 bp, Unknown
  misc_feature (1)..( 7): Result.006 file - promoters50/5668832
aaatcaa

SEQ ID NO: 199445 - DNA, 7 bp, Unknown
  misc_feature (1)..( 7): Result.006 file - promoters50/5668832
aaaacaa

SEQ ID NO: 199446 - DNA, 7 bp, Unknown
  misc_feature (1)..( 7): Result.006 file - promoters50/5668832
aaaacaa

SEQ ID NO: 199447 - DNA, 8 bp, Unknown
  misc_feature (1)..( 8): Result.006 file - promoters50/5668832
acattttc

SEQ ID NO: 199448 - DNA, 8 bp, Unknown
  misc_feature (1)..( 8): Result.006 file - promoters50/5668832
tcattttg

SEQ ID NO: 199449 - DNA, 8 bp, Unknown
  misc_feature (1)..( 8): Result.006 file - promoters50/5668832
tcacttta

SEQ ID NO: 199450 - DNA, 8 bp, Unknown
  misc_feature (1)..( 8): Result.006 file - promoters50/5668836
ctattttg

SEQ ID NO: 199451 - DNA, 9 bp, Unknown
  misc_feature (1)..( 9): Result.006 file - promoters50/5668836
aaatttaag

SEQ ID NO: 199452 - DNA, 9 bp, Unknown
  misc_feature (1)..( 9): Result.006 file - promoters50/5668836
aaatttaag

SEQ ID NO: 199453 - DNA, 9 bp, Unknown
  misc_feature (1)..( 9): Result.006 file - promoters50/5668836
aaatttatt

SEQ ID NO: 199454 - DNA, 7 bp, Unknown
  misc_feature (1)..( 7): Result.006 file - promoters50/5668836
gttttat

SEQ ID NO: 199455 - DNA, 7 bp, Unknown
  misc_feature (1)..( 7): Result.006 file - promoters50/5668836
attttat

SEQ ID NO: 199456 - DNA, 7 bp, Unknown
  misc_feature (1)..( 7): Result.006 file - promoters50/5668836
attttaa

SEQ ID NO: 199457 - DNA, 9 bp, Unknown
  misc_feature (1)..( 9): Result.006 file - promoters50/5668836
aaaattaaa

SEQ ID NO: 199458 - DNA, 9 bp, Unknown
  misc_feature (1)..( 9): Result.006 file - promoters50/5668836
aaaaataag

SEQ ID NO: 199459 - DNA, 9 bp, Unknown
  misc_feature (1)..( 9): Result.006 file - promoters50/5668836
tcgattaaa

SEQ ID NO: 199460 - DNA, 7 bp, Unknown
  misc_feature (1)..( 7): Result.006 file - promoters50/5668836
aaattaa

SEQ ID NO: 199461 - DNA, 7 bp, Unknown
  misc_feature (1)..( 7): Result.006 file - promoters50/5668836
aaactaa

SEQ ID NO: 199462 - DNA, 7 bp, Unknown
  misc_feature (1)..( 7): Result.006 file - promoters50/5668836
gaattaa

SEQ ID NO: 199463 - DNA, 9 bp, Unknown
  misc_feature (1)..( 9): Result.006 file - promoters50/5668836
aaggaacaa

SEQ ID NO: 199464 - DNA, 9 bp, Unknown
  misc_feature (1)..( 9): Result.006 file - promoters50/5668836
aagtaacca

SEQ ID NO: 199465 - DNA, 9 bp, Unknown
  misc_feature (1)..( 9): Result.006 file - promoters50/5668836
gagtagcca

SEQ ID NO: 199466 - DNA, 9 bp, Unknown
  misc_feature (1)..( 9): Result.006 file - promoters50/5668836
taaaatgcc

SEQ ID NO: 199467 - DNA, 9 bp, Unknown
  misc_feature (1)..( 9): Result.006 file - promoters50/5668836
taaaataag

SEQ ID NO: 199468 - DNA, 9 bp, Unknown
  misc_feature (1)..( 9): Result.006 file - promoters50/5668836
aaaactaag

SEQ ID NO: 199469 - DNA, 12 bp, Unknown
  misc_feature (1)..( 12): Result.006 file - promoters50/5668836
aaacatgtaaca

SEQ ID NO: 199470 - DNA, 12 bp, Unknown
  misc_feature (1)..( 12): Result.006 file - promoters50/5668836
aaacatttttta

SEQ ID NO: 199471 - DNA, 12 bp, Unknown
  misc_feature (1)..( 12): Result.006 file - promoters50/5668836
aaacacaataca

SEQ ID NO: 199472 - DNA, 11 bp, Unknown
  misc_feature (1)..( 11): Result.006 file - promoters50/5668836
taataatttaa

SEQ ID NO: 199473 - DNA, 11 bp, Unknown
  misc_feature (1)..( 11): Result.006 file - promoters50/5668836
taaaaatttta

SEQ ID NO: 199474 - DNA, 11 bp, Unknown
  misc_feature (1)..( 11): Result.006 file - promoters50/5668852
atataatttaa

SEQ ID NO: 199475 - DNA, 9 bp, Unknown
  misc_feature (1)..( 9): Result.006 file - promoters50/5668852
ccaaaaatg

SEQ ID NO: 199476 - DNA, 9 bp, Unknown
  misc_feature (1)..( 9): Result.006 file - promoters50/5668852
aataaaatg

SEQ ID NO: 199477 - DNA, 9 bp, Unknown
  misc_feature (1)..( 9): Result.006 file - promoters50/5668852
aatagaata

SEQ ID NO: 199478 - DNA, 14 bp, Unknown
  misc_feature (1)..( 14): Result.006 file - promoters50/5668852
aataagggaacaat

SEQ ID NO: 199479 - DNA, 14 bp, Unknown
  misc_feature (1)..( 14): Result.006 file - promoters50/5668852
aataaaggaaaaat

SEQ ID NO: 199480 - DNA, 14 bp, Unknown
  misc_feature (1)..( 14): Result.006 file - promoters50/5668860
aataaaatgtgggc

SEQ ID NO: 199481 - DNA, 8 bp, Unknown
  misc_feature (1)..( 8): Result.006 file - promoters50/5668860
catcgatt

SEQ ID NO: 199482 - DNA, 8 bp, Unknown
  misc_feature (1)..( 8): Result.006 file - promoters50/5668860
catagatt

SEQ ID NO: 199483 - DNA, 8 bp, Unknown
  misc_feature (1)..( 8): Result.006 file - promoters50/5668860
gatccatt

SEQ ID NO: 199484 - DNA, 7 bp, Unknown
  misc_feature (1)..( 7): Result.006 file - promoters50/5668860
ttaaatt

SEQ ID NO: 199485 - DNA, 7 bp, Unknown
  misc_feature (1)..( 7): Result.006 file - promoters50/5668860
ctaaatt

SEQ ID NO: 199486 - DNA, 7 bp, Unknown
  misc_feature (1)..( 7): Result.006 file - promoters50/5668860
ctaaata

SEQ ID NO: 199487 - DNA, 6 bp, Unknown
  misc_feature (1)..( 6): Result.006 file - promoters50/5668860
aaaaaa

SEQ ID NO: 199488 - DNA, 6 bp, Unknown
  misc_feature (1)..( 6): Result.006 file - promoters50/5668860
aaaaaa

SEQ ID NO: 199489 - DNA, 6 bp, Unknown
  misc_feature (1)..( 6): Result.006 file - promoters50/5668872
aaaaag

SEQ ID NO: 199490 - DNA, 8 bp, Unknown
  misc_feature (1)..( 8): Result.006 file - promoters50/5668872
ttttagtt

SEQ ID NO: 199491 - DNA, 8 bp, Unknown
  misc_feature (1)..( 8): Result.006 file - promoters50/5668872
gtttggtt

SEQ ID NO: 199492 - DNA, 8 bp, Unknown
  misc_feature (1)..( 8): Result.006 file - promoters50/5668872
ttttagaa

SEQ ID NO: 199493 - DNA, 8 bp, Unknown
  misc_feature (1)..( 8): Result.006 file - promoters50/5668872
gtttggtc

SEQ ID NO: 199494 - DNA, 8 bp, Unknown
  misc_feature (1)..( 8): Result.006 file - promoters50/5668872
tttcagac

SEQ ID NO: 199495 - DNA, 9 bp, Unknown
  misc_feature (1)..( 9): Result.006 file - promoters50/5668872
ctaacaaaa

SEQ ID NO: 199496 - DNA, 9 bp, Unknown
  misc_feature (1)..( 9): Result.006 file - promoters50/5668872
ttaacaact

SEQ ID NO: 199497 - DNA, 9 bp, Unknown
  misc_feature (1)..( 9): Result.006 file - promoters50/5668872
ctaagaaat

SEQ ID NO: 199498 - DNA, 9 bp, Unknown
  misc_feature (1)..( 9): Result.006 file - promoters50/5668872
agaagaaat

SEQ ID NO: 199499 - DNA, 9 bp, Unknown
  misc_feature (1)..( 9): Result.006 file - promoters50/5668882
tgaagaaga

SEQ ID NO: 199500 - DNA, 15 bp, Unknown
  misc_feature (1)..( 15): Result.006 file - promoters50/5668882
ttaacaagaaataaa

SEQ ID NO: 199501 - DNA, 15 bp, Unknown
  misc_feature (1)..( 15): Result.006 file - promoters50/5668882
tctataagaaaacat

SEQ ID NO: 199502 - DNA, 15 bp, Unknown
  misc_feature (1)..( 15): Result.006 file - promoters50/5668882
agtaaaagaaagaaa

SEQ ID NO: 199503 - DNA, 15 bp, Unknown
  misc_feature (1)..( 15): Result.006 file - promoters50/5668882
ttagcaaaaaaaata

SEQ ID NO: 199504 - DNA, 15 bp, Unknown
  misc_feature (1)..( 15): Result.006 file - promoters50/5668882
atcatatgaaattat

SEQ ID NO: 199505 - DNA, 15 bp, Unknown
  misc_feature (1)..( 15): Result.006 file - promoters50/5668882
taaatatgaatcgta

SEQ ID NO: 199506 - DNA, 15 bp, Unknown
  misc_feature (1)..( 15): Result.006 file - promoters50/5668882
cccagaaaaaaacta

SEQ ID NO: 199507 - DNA, 14 bp, Unknown
  misc_feature (1)..( 14): Result.006 file - promoters50/5668882
ccatgtttatgcct

SEQ ID NO: 199508 - DNA, 14 bp, Unknown
  misc_feature (1)..( 14): Result.006 file - promoters50/5668882
gtccttttctgcct

SEQ ID NO: 199509 - DNA, 14 bp, Unknown
  misc_feature (1)..( 14): Result.006 file - promoters50/5668882
tcttttttctcatt

SEQ ID NO: 199510 - DNA, 14 bp, Unknown
  misc_feature (1)..( 14): Result.006 file - promoters50/5668882
tagattttctttat

SEQ ID NO: 199511 - DNA, 14 bp, Unknown
  misc_feature (1)..( 14): Result.006 file - promoters50/5668882
tagatattcatatt

SEQ ID NO: 199512 - DNA, 14 bp, Unknown
  misc_feature (1)..( 14): Result.006 file - promoters50/5668893
taatttttctttgc

SEQ ID NO: 199513 - DNA, 12 bp, Unknown
  misc_feature (1)..( 12): Result.006 file - promoters50/5668893
aatcgtttaatt

SEQ ID NO: 199514 - DNA, 12 bp, Unknown
  misc_feature (1)..( 12): Result.006 file - promoters50/5668893
tagtctttaatc

SEQ ID NO: 199515 - DNA, 12 bp, Unknown
  misc_feature (1)..( 12): Result.006 file - promoters50/5668893
aatggttttatt

SEQ ID NO: 199516 - DNA, 8 bp, Unknown
  misc_feature (1)..( 8): Result.006 file - promoters50/5668893
tgttttct

SEQ ID NO: 199517 - DNA, 8 bp, Unknown
  misc_feature (1)..( 8): Result.006 file - promoters50/5668893
ccttttct

SEQ ID NO: 199518 - DNA, 8 bp, Unknown
  misc_feature (1)..( 8): Result.006 file - promoters50/5668903
ttttttca

SEQ ID NO: 199519 - DNA, 13 bp, Unknown
  misc_feature (1)..( 13): Result.006 file - promoters50/5668903
agactttaatttg

SEQ ID NO: 199520 - DNA, 13 bp, Unknown
  misc_feature (1)..( 13): Result.006 file - promoters50/5668903
tgattttcatttg

SEQ ID NO: 199521 - DNA, 13 bp, Unknown
  misc_feature (1)..( 13): Result.006 file - promoters50/5668903
tttgtttgattgt

SEQ ID NO: 199522 - DNA, 13 bp, Unknown
  misc_feature (1)..( 13): Result.006 file - promoters50/5668903
tttgtatgattat

SEQ ID NO: 199523 - DNA, 8 bp, Unknown
  misc_feature (1)..( 8): Result.006 file - promoters50/5668903
agacttta

SEQ ID NO: 199524 - DNA, 8 bp, Unknown
  misc_feature (1)..( 8): Result.006 file - promoters50/5668903
agaatttg

SEQ ID NO: 199525 - DNA, 8 bp, Unknown
  misc_feature (1)..( 8): Result.006 file - promoters50/5668903
cgaatttg

SEQ ID NO: 199526 - DNA, 11 bp, Unknown
  misc_feature (1)..( 11): Result.006 file - promoters50/5668903
ttttactagtc

SEQ ID NO: 199527 - DNA, 11 bp, Unknown
  misc_feature (1)..( 11): Result.006 file - promoters50/5668903
ttttattagtc

SEQ ID NO: 199528 - DNA, 11 bp, Unknown
  misc_feature (1)..( 11): Result.006 file - promoters50/5668903
gtttattataa

SEQ ID NO: 199529 - DNA, 11 bp, Unknown
  misc_feature (1)..( 11): Result.006 file - promoters50/5668903
tttgtatacca

SEQ ID NO: 199530 - DNA, 11 bp, Unknown
  misc_feature (1)..( 11): Result.006 file - promoters50/5668903
tttgtatgatt

SEQ ID NO: 199531 - DNA, 11 bp, Unknown
  misc_feature (1)..( 11): Result.006 file - promoters50/5668919
tttgtttgatt

SEQ ID NO: 199532 - DNA, 7 bp, Unknown
  misc_feature (1)..( 7): Result.006 file - promoters50/5668919
taaattt

SEQ ID NO: 199533 - DNA, 7 bp, Unknown
  misc_feature (1)..( 7): Result.006 file - promoters50/5668919
taaattg

SEQ ID NO: 199534 - DNA, 7 bp, Unknown
  misc_feature (1)..( 7): Result.006 file - promoters50/5668930
caaattg

SEQ ID NO: 199535 - DNA, 7 bp, Unknown
  misc_feature (1)..( 7): Result.006 file - promoters50/5668930
cgagaac

SEQ ID NO: 199536 - DNA, 7 bp, Unknown
  misc_feature (1)..( 7): Result.006 file - promoters50/5668930
cgagaaa

SEQ ID NO: 199537 - DNA, 7 bp, Unknown
  misc_feature (1)..( 7): Result.006 file - promoters50/5668930
ggagaaa

SEQ ID NO: 199538 - DNA, 10 bp, Unknown
  misc_feature (1)..( 10): Result.006 file - promoters50/5668930
taaagtttcc

SEQ ID NO: 199539 - DNA, 10 bp, Unknown
  misc_feature (1)..( 10): Result.006 file - promoters50/5668930
taaattttct

SEQ ID NO: 199540 - DNA, 7 bp, Unknown
  misc_feature (1)..( 7): Result.006 file - promoters50/5668930
attctct

SEQ ID NO: 199541 - DNA, 8 bp, Unknown
  misc_feature (1)..( 8): Result.006 file - promoters50/5668930
cagatcaa

SEQ ID NO: 199542 - DNA, 8 bp, Unknown
  misc_feature (1)..( 8): Result.006 file - promoters50/5668930
aagaccaa

SEQ ID NO: 199543 - DNA, 8 bp, Unknown
  misc_feature (1)..( 8): Result.006 file - promoters50/5668930
cagatctc

SEQ ID NO: 199544 - DNA, 9 bp, Unknown
  misc_feature (1)..( 9): Result.006 file - promoters50/5668930
ccatctcac

SEQ ID NO: 199545 - DNA, 9 bp, Unknown
  misc_feature (1)..( 9): Result.006 file - promoters50/5668930
ctatctcac

SEQ ID NO: 199546 - DNA, 9 bp, Unknown
  misc_feature (1)..( 9): Result.006 file - promoters50/5668930
ctatctctt

SEQ ID NO: 199547 - DNA, 7 bp, Unknown
  misc_feature (1)..( 7): Result.006 file - promoters50/5668930
aacaaat

SEQ ID NO: 199548 - DNA, 7 bp, Unknown
  misc_feature (1)..( 7): Result.006 file - promoters50/5668930
aaccaat

SEQ ID NO: 199549 - DNA, 7 bp, Unknown
  misc_feature (1)..( 7): Result.006 file - promoters50/5668951
aaccaaa

SEQ ID NO: 199550 - DNA, 8 bp, Unknown
  misc_feature (1)..( 8): Result.006 file - promoters50/5668951
ttttaatt

SEQ ID NO: 199551 - DNA, 8 bp, Unknown
  misc_feature (1)..( 8): Result.006 file - promoters50/5668951
tttcaatt

SEQ ID NO: 199552 - DNA, 8 bp, Unknown
  misc_feature (1)..( 8): Result.006 file - promoters50/5668951
attcaatg

SEQ ID NO: 199553 - DNA, 8 bp, Unknown
  misc_feature (1)..( 8): Result.006 file - promoters50/5668951
attcaact

SEQ ID NO: 199554 - DNA, 8 bp, Unknown
  misc_feature (1)..( 8): Result.006 file - promoters50/5668951
taaaccaa

SEQ ID NO: 199555 - DNA, 8 bp, Unknown
  misc_feature (1)..( 8): Result.006 file - promoters50/5668951
caaaacaa

SEQ ID NO: 199556 - DNA, 8 bp, Unknown
  misc_feature (1)..( 8): Result.006 file - promoters50/5668951
caaaccaa

SEQ ID NO: 199557 - DNA, 8 bp, Unknown
  misc_feature (1)..( 8): Result.006 file - promoters50/5668951
aaaaacaa

SEQ ID NO: 199558 - DNA, 8 bp, Unknown
  misc_feature (1)..( 8): Result.006 file - promoters50/5668951
gttatctc

SEQ ID NO: 199559 - DNA, 8 bp, Unknown
  misc_feature (1)..( 8): Result.006 file - promoters50/5668951
cttatcta

SEQ ID NO: 199560 - DNA, 8 bp, Unknown
  misc_feature (1)..( 8): Result.006 file - promoters50/5668951
cttttctt

SEQ ID NO: 199561 - DNA, 8 bp, Unknown
  misc_feature (1)..( 8): Result.006 file - promoters50/5668974
ttttcctt

SEQ ID NO: 199562 - DNA, 10 bp, Unknown
  misc_feature (1)..( 10): Result.006 file - promoters50/5668974
taaattaaac

SEQ ID NO: 199563 - DNA, 10 bp, Unknown
  misc_feature (1)..( 10): Result.006 file - promoters50/5668974
caaactaaac

SEQ ID NO: 199564 - DNA, 10 bp, Unknown
  misc_feature (1)..( 10): Result.006 file - promoters50/5668974
gcaattaaaa

SEQ ID NO: 199565 - DNA, 10 bp, Unknown
  misc_feature (1)..( 10): Result.006 file - promoters50/5668974
ttaattaatt

SEQ ID NO: 199566 - DNA, 10 bp, Unknown
  misc_feature (1)..( 10): Result.006 file - promoters50/5668974
taaataaaaa

SEQ ID NO: 199567 - DNA, 10 bp, Unknown
  misc_feature (1)..( 10): Result.006 file - promoters50/5669002
ccaatgaaac

SEQ ID NO: 199568 - DNA, 10 bp, Unknown
  misc_feature (1)..( 10): Result.006 file - promoters50/5669002
tcaaaaacca

SEQ ID NO: 199569 - DNA, 10 bp, Unknown
  misc_feature (1)..( 10): Result.006 file - promoters50/5669002
gttaaaacca

SEQ ID NO: 199570 - DNA, 11 bp, Unknown
  misc_feature (1)..( 11): Result.006 file - promoters50/5669013
atcaataacag

SEQ ID NO: 199571 - DNA, 11 bp, Unknown
  misc_feature (1)..( 11): Result.006 file - promoters50/5669013
aaaatctttca

SEQ ID NO: 199572 - DNA, 11 bp, Unknown
  misc_feature (1)..( 11): Result.006 file - promoters50/5669013
aaattctctac

SEQ ID NO: 199573 - DNA, 11 bp, Unknown
  misc_feature (1)..( 11): Result.006 file - promoters50/5669013
taaatattttt

SEQ ID NO: 199574 - DNA, 11 bp, Unknown
  misc_feature (1)..( 11): Result.006 file - promoters50/5669013
tcaatatttta

SEQ ID NO: 199575 - DNA, 11 bp, Unknown
  misc_feature (1)..( 11): Result.006 file - promoters50/5669025
tgaatatgtta

SEQ ID NO: 199576 - DNA, 11 bp, Unknown
  misc_feature (1)..( 11): Result.006 file - promoters50/5669025
atgttttgttt

SEQ ID NO: 199577 - DNA, 11 bp, Unknown
  misc_feature (1)..( 11): Result.006 file - promoters50/5669025
gacttttgttc

SEQ ID NO: 199578 - DNA, 11 bp, Unknown
  misc_feature (1)..( 11): Result.006 file - promoters50/5669025
aggttatgtta

SEQ ID NO: 199579 - DNA, 11 bp, Unknown
  misc_feature (1)..( 11): Result.006 file - promoters50/5669025
accctatatta

SEQ ID NO: 199580 - DNA, 11 bp, Unknown
  misc_feature (1)..( 11): Result.006 file - promoters50/5669025
aggatatgtgg

SEQ ID NO: 199581 - DNA, 11 bp, Unknown
  misc_feature (1)..( 11): Result.006 file - promoters50/5669025
aagttatgcgc

SEQ ID NO: 199582 - DNA, 15 bp, Unknown
  misc_feature (1)..( 15): Result.006 file - promoters50/5669025
cttgttttaattttc

SEQ ID NO: 199583 - DNA, 15 bp, Unknown
  misc_feature (1)..( 15): Result.006 file - promoters50/5669025
cgttttttaaaagga

SEQ ID NO: 199584 - DNA, 15 bp, Unknown
  misc_feature (1)..( 15): Result.006 file - promoters50/5669025
cgttttttagttttc

SEQ ID NO: 199585 - DNA, 16 bp, Unknown
  misc_feature (1)..( 16): Result.006 file - promoters50/5669025
tggtttttcaaagaag

SEQ ID NO: 199586 - DNA, 16 bp, Unknown
  misc_feature (1)..( 16): Result.006 file - promoters50/5669025
cgcttttccagtgtgt

SEQ ID NO: 199587 - DNA, 16 bp, Unknown
  misc_feature (1)..( 16): Result.006 file - promoters50/5669236
tagtttaggttaacta

SEQ ID NO: 199588 - DNA, 7 bp, Unknown
  misc_feature (1)..( 7): Result.006 file - promoters50/5669236
taaaaat

SEQ ID NO: 199589 - DNA, 7 bp, Unknown
  misc_feature (1)..( 7): Result.006 file - promoters50/5669236
gaaaaat

SEQ ID NO: 199590 - DNA, 7 bp, Unknown
  misc_feature (1)..( 7): Result.006 file - promoters50/5669236
gaaaaag

SEQ ID NO: 199591 - DNA, 9 bp, Unknown
  misc_feature (1)..( 9): Result.006 file - promoters50/5669236
aattttaaa

SEQ ID NO: 199592 - DNA, 9 bp, Unknown
  misc_feature (1)..( 9): Result.006 file - promoters50/5669236
aattataaa

SEQ ID NO: 199593 - DNA, 9 bp, Unknown
  misc_feature (1)..( 9): Result.006 file - promoters50/5669243
tgctttaaa

SEQ ID NO: 199594 - DNA, 8 bp, Unknown
  misc_feature (1)..( 8): Result.006 file - promoters50/5669243
taacttgt

SEQ ID NO: 199595 - DNA, 8 bp, Unknown
  misc_feature (1)..( 8): Result.006 file - promoters50/5669243
taacttga

SEQ ID NO: 199596 - DNA, 8 bp, Unknown
  misc_feature (1)..( 8): Result.006 file - promoters50/5669243
tcacttgt

SEQ ID NO: 199597 - DNA, 9 bp, Unknown
  misc_feature (1)..( 9): Result.006 file - promoters50/5669243
gcatgagtt

SEQ ID NO: 199598 - DNA, 9 bp, Unknown
  misc_feature (1)..( 9): Result.006 file - promoters50/5669243
gcaagagta

SEQ ID NO: 199599 - DNA, 9 bp, Unknown
  misc_feature (1)..( 9): Result.006 file - promoters50/5669243
agatgtgtt

SEQ ID NO: 199600 - DNA, 13 bp, Unknown
  misc_feature (1)..( 13): Result.006 file - promoters50/5669243
tttgcaaataagg

SEQ ID NO: 199601 - DNA, 13 bp, Unknown
  misc_feature (1)..( 13): Result.006 file - promoters50/5669243
ttttcaattcaga

SEQ ID NO: 199602 - DNA, 13 bp, Unknown
  misc_feature (1)..( 13): Result.006 file - promoters50/5669243
tttggaaaagaaa

SEQ ID NO: 199603 - DNA, 13 bp, Unknown
  misc_feature (1)..( 13): Result.006 file - promoters50/5669243
aagggaaatgaaa

SEQ ID NO: 199604 - DNA, 11 bp, Unknown
  misc_feature (1)..( 11): Result.006 file - promoters50/5669243
tttgcaaataa

SEQ ID NO: 199605 - DNA, 11 bp, Unknown
  misc_feature (1)..( 11): Result.006 file - promoters50/5669243
aaagaaaataa

SEQ ID NO: 199606 - DNA, 11 bp, Unknown
  misc_feature (1)..( 11): Result.006 file - promoters50/5669243
aaatgaaatat

SEQ ID NO: 199607 - DNA, 11 bp, Unknown
  misc_feature (1)..( 11): Result.006 file - promoters50/5669243
aatatattttc

SEQ ID NO: 199608 - DNA, 11 bp, Unknown
  misc_feature (1)..( 11): Result.006 file - promoters50/5669243
aatttatgttc

SEQ ID NO: 199609 - DNA, 11 bp, Unknown
  misc_feature (1)..( 11): Result.006 file - promoters50/5669243
gtgatatgttg

SEQ ID NO: 199610 - DNA, 8 bp, Unknown
  misc_feature (1)..( 8): Result.006 file - promoters50/5669243
ggttttgt

SEQ ID NO: 199611 - DNA, 8 bp, Unknown
  misc_feature (1)..( 8): Result.006 file - promoters50/5669243
ggtgttgg

SEQ ID NO: 199612 - DNA, 8 bp, Unknown
  misc_feature (1)..( 8): Result.006 file - promoters50/5669243
ctcgttgt

SEQ ID NO: 199613 - DNA, 10 bp, Unknown
  misc_feature (1)..( 10): Result.006 file - promoters50/5669243
ctaaattggg

SEQ ID NO: 199614 - DNA, 10 bp, Unknown
  misc_feature (1)..( 10): Result.006 file - promoters50/5669243
tgtaatcggg

SEQ ID NO: 199615 - DNA, 10 bp, Unknown
  misc_feature (1)..( 10): Result.006 file - promoters50/5669250
tgtgatcgaa

SEQ ID NO: 199616 - DNA, 10 bp, Unknown
  misc_feature (1)..( 10): Result.006 file - promoters50/5669250
ggtgataata

SEQ ID NO: 199617 - DNA, 10 bp, Unknown
  misc_feature (1)..( 10): Result.006 file - promoters50/5669250
taaaataata

SEQ ID NO: 199618 - DNA, 10 bp, Unknown
  misc_feature (1)..( 10): Result.006 file - promoters50/5669250
gaaaaaaatt

SEQ ID NO: 199619 - DNA, 10 bp, Unknown
  misc_feature (1)..( 10): Result.006 file - promoters50/5669250
ttaaataaat

SEQ ID NO: 199620 - DNA, 10 bp, Unknown
  misc_feature (1)..( 10): Result.006 file - promoters50/5669250
taaattaatt

SEQ ID NO: 199621 - DNA, 10 bp, Unknown
  misc_feature (1)..( 10): Result.006 file - promoters50/5669250
cagaataaaa

SEQ ID NO: 199622 - DNA, 15 bp, Unknown
  misc_feature (1)..( 15): Result.006 file - promoters50/5669250
taatcaatttataat

SEQ ID NO: 199623 - DNA, 15 bp, Unknown
  misc_feature (1)..( 15): Result.006 file - promoters50/5669250
agtacaaattacaat

SEQ ID NO: 199624 - DNA, 15 bp, Unknown
  misc_feature (1)..( 15): Result.006 file - promoters50/5669250
gtatttatttatatt

SEQ ID NO: 199625 - DNA, 15 bp, Unknown
  misc_feature (1)..( 15): Result.006 file - promoters50/5669250
taataaatttgtgaa

SEQ ID NO: 199626 - DNA, 15 bp, Unknown
  misc_feature (1)..( 15): Result.006 file - promoters50/5669250
gaagcaaattctaac

SEQ ID NO: 199627 - DNA, 15 bp, Unknown
  misc_feature (1)..( 15): Result.006 file - promoters50/5669508
cttcaaaattatatc

SEQ ID NO: 199628 - DNA, 11 bp, Unknown
  misc_feature (1)..( 11): Result.006 file - promoters50/5669508
tttcaaaaata

SEQ ID NO: 199629 - DNA, 11 bp, Unknown
  misc_feature (1)..( 11): Result.006 file - promoters50/5669508
aaacaaaaaga

SEQ ID NO: 199630 - DNA, 11 bp, Unknown
  misc_feature (1)..( 11): Result.006 file - promoters50/5669508
agtcaaaagtg

SEQ ID NO: 199631 - DNA, 11 bp, Unknown
  misc_feature (1)..( 11): Result.006 file - promoters50/5669508
atgtaaaaatt

SEQ ID NO: 199632 - DNA, 11 bp, Unknown
  misc_feature (1)..( 11): Result.006 file - promoters50/5669508
aaacaaaacta

SEQ ID NO: 199633 - DNA, 11 bp, Unknown
  misc_feature (1)..( 11): Result.006 file - promoters50/5669546
aattaataatt

SEQ ID NO: 199634 - DNA, 9 bp, Unknown
  misc_feature (1)..( 9): Result.006 file - promoters50/5669546
ccatacctc

SEQ ID NO: 199635 - DNA, 9 bp, Unknown
  misc_feature (1)..( 9): Result.006 file - promoters50/5669546
tgatatctc

SEQ ID NO: 199636 - DNA, 9 bp, Unknown
  misc_feature (1)..( 9): Result.006 file - promoters50/5669546
tgatgtctt

SEQ ID NO: 199637 - DNA, 9 bp, Unknown
  misc_feature (1)..( 9): Result.006 file - promoters50/5669546
atatgtctc

SEQ ID NO: 199638 - DNA, 8 bp, Unknown
  misc_feature (1)..( 8): Result.006 file - promoters50/5669546
cgacatgt

SEQ ID NO: 199639 - DNA, 8 bp, Unknown
  misc_feature (1)..( 8): Result.006 file - promoters50/5669546
cgacatgt

SEQ ID NO: 199640 - DNA, 8 bp, Unknown
  misc_feature (1)..( 8): Result.006 file - promoters50/5669546
acacatgt

SEQ ID NO: 199641 - DNA, 8 bp, Unknown
  misc_feature (1)..( 8): Result.006 file - promoters50/5669724
cgacatta

SEQ ID NO: 199642 - DNA, 13 bp, Unknown
  misc_feature (1)..( 13): Result.006 file - promoters50/5669724
gaatttactgaaa

SEQ ID NO: 199643 - DNA, 13 bp, Unknown
  misc_feature (1)..( 13): Result.006 file - promoters50/5669724
gccattattgatc

SEQ ID NO: 199644 - DNA, 13 bp, Unknown
  misc_feature (1)..( 13): Result.006 file - promoters50/5669724
ttaatttttgtat

SEQ ID NO: 199645 - DNA, 13 bp, Unknown
  misc_feature (1)..( 13): Result.006 file - promoters50/5669724
taaatgtttcaaa

SEQ ID NO: 199646 - DNA, 13 bp, Unknown
  misc_feature (1)..( 13): Result.006 file - promoters50/5669724
taaatctttgttc

SEQ ID NO: 199647 - DNA, 13 bp, Unknown
  misc_feature (1)..( 13): Result.006 file - promoters50/5669724
attgtgtttgaaa

SEQ ID NO: 199648 - DNA, 13 bp, Unknown
  misc_feature (1)..( 13): Result.006 file - promoters50/5669838
aatttaattctat

SEQ ID NO: 199649 - DNA, 8 bp, Unknown
  misc_feature (1)..( 8): Result.006 file - promoters50/5669838
ttatttca

SEQ ID NO: 199650 - DNA, 8 bp, Unknown
  misc_feature (1)..( 8): Result.006 file - promoters50/5669838
ttatttcc

SEQ ID NO: 199651 - DNA, 8 bp, Unknown
  misc_feature (1)..( 8): Result.006 file - promoters50/5669838
agatttca

SEQ ID NO: 199652 - DNA, 7 bp, Unknown
  misc_feature (1)..( 7): Result.006 file - promoters50/5669838
tttttct

SEQ ID NO: 199653 - DNA, 7 bp, Unknown
  misc_feature (1)..( 7): Result.006 file - promoters50/5669838
tttttct

SEQ ID NO: 199654 - DNA, 7 bp, Unknown
  misc_feature (1)..( 7): Result.006 file - promoters50/5670300
gttttct

SEQ ID NO: 199655 - DNA, 8 bp, Unknown
  misc_feature (1)..( 8): Result.006 file - promoters50/5670300
ttcttgcc

SEQ ID NO: 199656 - DNA, 8 bp, Unknown
  misc_feature (1)..( 8): Result.006 file - promoters50/5670300
ttctggcc

SEQ ID NO: 199657 - DNA, 8 bp, Unknown
  misc_feature (1)..( 8): Result.006 file - promoters50/5670300
gtcttgcg

SEQ ID NO: 199658 - DNA, 31 bp, Unknown; identical to SEQ ID NO: 72331
  misc_feature (1)..( 31): Result.006 file - promoters50/5670300

SEQ ID NO: 199659 - DNA, 31 bp, Unknown; identical to SEQ ID NO: 186078
  misc_feature (1)..( 31): Result.006 file - promoters50/5670300

SEQ ID NO: 199660 - DNA, 31 bp, Unknown; identical to SEQ ID NO: 186077
  misc_feature (1)..( 31): Result.006 file - promoters50/5670300

SEQ ID NO: 199661 - DNA, 30 bp, Unknown; identical to SEQ ID NO: 71939
  misc_feature (1)..( 30): Result.006 file - promoters50/5670300

SEQ ID NO: 199662 - DNA, 30 bp, Unknown; identical to SEQ ID NO: 184369
  misc_feature (1)..( 30): Result.006 file - promoters50/5670300

SEQ ID NO: 199663 - DNA, 30 bp, Unknown; identical to SEQ ID NO: 184367
  misc_feature (1)..( 30): Result.006 file - promoters50/5670300

SEQ ID NO: 199664 - DNA, 15 bp, Unknown
  misc_feature (1)..( 15): Result.006 file - promoters50/5670300
cgccttagctttctc

SEQ ID NO: 199665 - DNA, 15 bp, Unknown
  misc_feature (1)..( 15): Result.006 file - promoters50/5670300
cgccttagctttctc

SEQ ID NO: 199666 - DNA, 15 bp, Unknown
  misc_feature (1)..( 15): Result.006 file - promoters50/5670300
cgccttagctttctc

SEQ ID NO: 199667 - DNA, 22 bp, Unknown
  misc_feature (1)..( 22): Result.006 file - promoters50/5670300
gaccgagtcgtcctcgtctttt

SEQ ID NO: 199668 - DNA, 22 bp, Unknown
  misc_feature (1)..( 22): Result.006 file - promoters50/5670300
gaccgactcgtcctcgtctttt

SEQ ID NO: 199669 - DNA, 22 bp, Unknown
  misc_feature (1)..( 22): Result.006 file - promoters50/5670300
gacctagtcgtcctcgtctttt

SEQ ID NO: 199670 - DNA, 19 bp, Unknown
  misc_feature (1)..( 19): Result.006 file - promoters50/5670300
ttttgcttctataaatcaa

SEQ ID NO: 199671 - DNA, 19 bp, Unknown
  misc_feature (1)..( 19): Result.006 file - promoters50/5670300
ttcttcttctataaaacaa

SEQ ID NO: 199672 - DNA, 19 bp, Unknown
  misc_feature (1)..( 19): Result.006 file - promoters50/5670300
gatctttgccggaaaacaa

SEQ ID NO: 199673 - DNA, 19 bp, Unknown
  misc_feature (1)..( 19): Result.006 file - promoters50/5670300
ttcttcttctataaattaa

SEQ ID NO: 199674 - DNA, 9 bp, Unknown
  misc_feature (1)..( 9): Result.006 file - promoters50/5670300
caataaaac

SEQ ID NO: 199675 - DNA, 9 bp, Unknown
  misc_feature (1)..( 9): Result.006 file - promoters50/5670300
caaaaaaaa

SEQ ID NO: 199676 - DNA, 9 bp, Unknown
  misc_feature (1)..( 9): Result.006 file - promoters50/5670300
gaaaacaac

SEQ ID NO: 199677 - DNA, 6 bp, Unknown
  misc_feature (1)..( 6): Result.006 file - promoters50/5670300
aaaaca

SEQ ID NO: 199678 - DNA, 6 bp, Unknown
  misc_feature (1)..( 6): Result.006 file - promoters50/5670300
aaaaca

SEQ ID NO: 199679 - DNA, 6 bp, Unknown
  misc_feature (1)..( 6): Result.006 file - promoters50/5670546
aaaaca

SEQ ID NO: 199680 - DNA, 7 bp, Unknown
  misc_feature (1)..( 7): Result.006 file - promoters50/5670546
tgttcag

SEQ ID NO: 199681 - DNA, 7 bp, Unknown
  misc_feature (1)..( 7): Result.006 file - promoters50/5670546
tgttcaa

SEQ ID NO: 199682 - DNA, 7 bp, Unknown
  misc_feature (1)..( 7): Result.006 file - promoters50/5670553
ggttcaa

SEQ ID NO: 199683 - DNA, 8 bp, Unknown
  misc_feature (1)..( 8): Result.006 file - promoters50/5670553
atgaacac

SEQ ID NO: 199684 - DNA, 8 bp, Unknown
  misc_feature (1)..( 8): Result.006 file - promoters50/5670553
atgaacaa

SEQ ID NO: 199685 - DNA, 8 bp, Unknown
  misc_feature (1)..( 8): Result.006 file - promoters50/5670553
atgtacaa

SEQ ID NO: 199686 - DNA, 8 bp, Unknown
  misc_feature (1)..( 8): Result.006 file - promoters50/5670553
cggtacaa

SEQ ID NO: 199687 - DNA, 10 bp, Unknown
  misc_feature (1)..( 10): Result.006 file - promoters50/5670553
atcaacacca

SEQ ID NO: 199688 - DNA, 10 bp, Unknown
  misc_feature (1)..( 10): Result.006 file - promoters50/5670553
aaaaacccca

SEQ ID NO: 199689 - DNA, 10 bp, Unknown
  misc_feature (1)..( 10): Result.006 file - promoters50/5670592
aaaaacccaa

SEQ ID NO: 199690 - DNA, 11 bp, Unknown
  misc_feature (1)..( 11): Result.006 file - promoters50/5670592
aatagagaact

SEQ ID NO: 199691 - DNA, 11 bp, Unknown
  misc_feature (1)..( 11): Result.006 file - promoters50/5670592
aatagtgaaat

SEQ ID NO: 199692 - DNA, 11 bp, Unknown
  misc_feature (1)..( 11): Result.006 file - promoters50/5670592
tatacagactt

SEQ ID NO: 199693 - DNA, 11 bp, Unknown
  misc_feature (1)..( 11): Result.006 file - promoters50/5670592
aatacaaactt

SEQ ID NO: 199694 - DNA, 11 bp, Unknown
  misc_feature (1)..( 11): Result.006 file - promoters50/5670592
tataaaaacac

SEQ ID NO: 199695 - DNA, 11 bp, Unknown
  misc_feature (1)..( 11): Result.006 file - promoters50/5670592
ctaccaaactg

SEQ ID NO: 199696 - DNA, 11 bp, Unknown
  misc_feature (1)..( 11): Result.006 file - promoters50/5670680
actgaaaacaa

SEQ ID NO: 199697 - DNA, 8 bp, Unknown
  misc_feature (1)..( 8): Result.006 file - promoters50/5670680
atatgatt

SEQ ID NO: 199698 - DNA, 8 bp, Unknown
  misc_feature (1)..( 8): Result.006 file - promoters50/5670680
ataagata

SEQ ID NO: 199699 - DNA, 8 bp, Unknown
  misc_feature (1)..( 8): Result.006 file - promoters50/5670784
ataatata

SEQ ID NO: 199700 - DNA, 8 bp, Unknown
  misc_feature (1)..( 8): Result.006 file - promoters50/5670784
atttattt

SEQ ID NO: 199701 - DNA, 8 bp, Unknown
  misc_feature (1)..( 8): Result.006 file - promoters50/5670784
attttttt

SEQ ID NO: 199702 - DNA, 8 bp, Unknown
  misc_feature (1)..( 8): Result.006 file - promoters50/5670784
aataatta

SEQ ID NO: 199703 - DNA, 8 bp, Unknown
  misc_feature (1)..( 8): Result.006 file - promoters50/5670784
gtttattc

SEQ ID NO: 199704 - DNA, 10 bp, Unknown
  misc_feature (1)..( 10): Result.006 file - promoters50/5670784
tgaaggatat

SEQ ID NO: 199705 - DNA, 10 bp, Unknown
  misc_feature (1)..( 10): Result.006 file - promoters50/5670784
tgaatgatat

SEQ ID NO: 199706 - DNA, 10 bp, Unknown
  misc_feature (1)..( 10): Result.006 file - promoters50/5670784
aaaattatat

SEQ ID NO: 199707 - DNA, 11 bp, Unknown
  misc_feature (1)..( 11): Result.006 file - promoters50/5670784
caaatgcatgt

SEQ ID NO: 199708 - DNA, 9 bp, Unknown
  misc_feature (1)..( 9): Result.006 file - promoters50/5670784
tttgaaaag

SEQ ID NO: 199709 - DNA, 9 bp, Unknown
  misc_feature (1)..( 9): Result.006 file - promoters50/5670784
ttttaaaaa

SEQ ID NO: 199710 - DNA, 9 bp, Unknown
  misc_feature (1)..( 9): Result.006 file - promoters50/5671204
gaataaaaa

SEQ ID NO: 199711 - DNA, 8 bp, Unknown
  misc_feature (1)..( 8): Result.006 file - promoters50/5671204
tatcaaaa

SEQ ID NO: 199712 - DNA, 8 bp, Unknown
  misc_feature (1)..( 8): Result.006 file - promoters50/5671204
aatcaaat

SEQ ID NO: 199713 - DNA, 8 bp, Unknown
  misc_feature (1)..( 8): Result.006 file - promoters50/5671204
tataaaaa

SEQ ID NO: 199714 - DNA, 8 bp, Unknown
  misc_feature (1)..( 8): Result.006 file - promoters50/5671204
tgtcaaat

SEQ ID NO: 199715 - DNA, 8 bp, Unknown
  misc_feature (1)..( 8): Result.006 file - promoters50/5671204
tgttaaac

SEQ ID NO: 199716 - DNA, 8 bp, Unknown
  misc_feature (1)..( 8): Result.006 file - promoters50/5671262
aataaaaa

SEQ ID NO: 199717 - DNA, 9 bp, Unknown
  misc_feature (1)..( 9): Result.006 file - promoters50/5671262
gaaagctct

SEQ ID NO: 199718 - DNA, 9 bp, Unknown
  misc_feature (1)..( 9): Result.006 file - promoters50/5671262
taaagctaa

SEQ ID NO: 199719 - DNA, 9 bp, Unknown
  misc_feature (1)..( 9): Result.006 file - promoters50/5671262
aaaacctct

SEQ ID NO: 199720 - DNA, 9 bp, Unknown
  misc_feature (1)..( 9): Result.006 file - promoters50/5671262
taaaccttg

SEQ ID NO: 199721 - DNA, 9 bp, Unknown
  misc_feature (1)..( 9): Result.006 file - promoters50/5671262
tgaaccttc

SEQ ID NO: 199722 - DNA, 9 bp, Unknown
  misc_feature (1)..( 9): Result.006 file - promoters50/5671318
tgaatcttg

SEQ ID NO: 199723 - DNA, 16 bp, Unknown
  misc_feature (1)..( 16): Result.006 file - promoters50/5671318
ataaacattgttatta

SEQ ID NO: 199724 - DNA, 16 bp, Unknown
  misc_feature (1)..( 16): Result.006 file - promoters50/5671318
ctacgtattattattc

SEQ ID NO: 199725 - DNA, 16 bp, Unknown
  misc_feature (1)..( 16): Result.006 file - promoters50/5671318
cttaaatttgttctta

SEQ ID NO: 199726 - DNA, 16 bp, Unknown
  misc_feature (1)..( 16): Result.006 file - promoters50/5671318
ctacgtataatttaat

SEQ ID NO: 199727 - DNA, 16 bp, Unknown
  misc_feature (1)..( 16): Result.006 file - promoters50/5671318
tgacggataattccgg

SEQ ID NO: 199728 - DNA, 16 bp, Unknown
  misc_feature (1)..( 16): Result.006 file - promoters50/5671318
gaaagtaatatgtata

SEQ ID NO: 199729 - DNA, 15 bp, Unknown
  misc_feature (1)..( 15): Result.006 file - promoters50/5671318
ttctgcatattttgt

SEQ ID NO: 199730 - DNA, 15 bp, Unknown
  misc_feature (1)..( 15): Result.006 file - promoters50/5671318
ctacgtataatttaa

SEQ ID NO: 199731 - DNA, 15 bp, Unknown
  misc_feature (1)..( 15): Result.006 file - promoters50/5671318
ctacgtattattatt

SEQ ID NO: 199732 - DNA, 15 bp, Unknown
  misc_feature (1)..( 15): Result.006 file - promoters50/5671318
tgacggataattccg

SEQ ID NO: 199733 - DNA, 15 bp, Unknown
  misc_feature (1)..( 15): Result.006 file - promoters50/5671318
gaaagtaatatgtat

SEQ ID NO: 199734 - DNA, 15 bp, Unknown
  misc_feature (1)..( 15): Result.006 file - promoters50/5671338
tcttcttaaatttgt

SEQ ID NO: 199735 - DNA, 8 bp, Unknown
  misc_feature (1)..( 8): Result.006 file - promoters50/5671338
attttgga

SEQ ID NO: 199736 - DNA, 8 bp, Unknown
  misc_feature (1)..( 8): Result.006 file - promoters50/5671338
attttggt

SEQ ID NO: 199737 - DNA, 8 bp, Unknown
  misc_feature (1)..( 8): Result.006 file - promoters50/5671338
ttttcggt

SEQ ID NO: 199738 - DNA, 10 bp, Unknown
  misc_feature (1)..( 10): Result.006 file - promoters50/5671338
gtaaatgtca

SEQ ID NO: 199739 - DNA, 10 bp, Unknown
  misc_feature (1)..( 10): Result.006 file - promoters50/5671338
gtaaatgtaa

SEQ ID NO: 199740 - DNA, 10 bp, Unknown
  misc_feature (1)..( 10): Result.006 file - promoters50/5671338
caaaatttaa

SEQ ID NO: 199741 - DNA, 7 bp, Unknown
  misc_feature (1)..( 7): Result.006 file - promoters50/5671338
gttaaaa

SEQ ID NO: 199742 - DNA, 7 bp, Unknown
  misc_feature (1)..( 7): Result.006 file - promoters50/5671338
tttaaaa

SEQ ID NO: 199743 - DNA, 7 bp, Unknown
  misc_feature (1)..( 7): Result.006 file - promoters50/5671338
gttaaat

SEQ ID NO: 199744 - DNA, 9 bp, Unknown
  misc_feature (1)..( 9): Result.006 file - promoters50/5671338
tgaaacttt

SEQ ID NO: 199745 - DNA, 9 bp, Unknown
  misc_feature (1)..( 9): Result.006 file - promoters50/5671338
tgaaatttt

SEQ ID NO: 199746 - DNA, 9 bp, Unknown
  misc_feature (1)..( 9): Result.006 file - promoters50/5671338
tttaatttt

SEQ ID NO: 199747 - DNA, 10 bp, Unknown
  misc_feature (1)..( 10): Result.006 file - promoters50/5671338
tttaatgaat

SEQ ID NO: 199748 - DNA, 10 bp, Unknown
  misc_feature (1)..( 10): Result.006 file - promoters50/5671338
tttaatgaat

SEQ ID NO: 199749 - DNA, 10 bp, Unknown
  misc_feature (1)..( 10): Result.006 file - promoters50/5671338
tttaattttt

SEQ ID NO: 199750 - DNA, 10 bp, Unknown
  misc_feature (1)..( 10): Result.006 file - promoters50/5671338
aatgatattt

SEQ ID NO: 199751 - DNA, 10 bp, Unknown
  misc_feature (1)..( 10): Result.006 file - promoters50/5671338
tttgattttt

SEQ ID NO: 199752 - DNA, 10 bp, Unknown
  misc_feature (1)..( 10): Result.006 file - promoters50/5671338
tttaattttt

SEQ ID NO: 199753 - DNA, 9 bp, Unknown
  misc_feature (1)..( 9): Result.006 file - promoters50/5671338
aataattct

SEQ ID NO: 199754 - DNA, 9 bp, Unknown
  misc_feature (1)..( 9): Result.006 file - promoters50/5671338
aattattgg

SEQ ID NO: 199755 - DNA, 9 bp, Unknown
  misc_feature (1)..( 9): Result.006 file - promoters50/5671338
attaattct

SEQ ID NO: 199756 - DNA, 8 bp, Unknown
  misc_feature (1)..( 8): Result.006 file - promoters50/5671338
caaaatgt

SEQ ID NO: 199757 - DNA, 8 bp, Unknown
  misc_feature (1)..( 8): Result.006 file - promoters50/5671338
caaaatta

SEQ ID NO: 199758 - DNA, 8 bp, Unknown
  misc_feature (1)..( 8): Result.006 file - promoters50/5671710
caacatta

SEQ ID NO: 199759 - DNA, 8 bp, Unknown
  misc_feature (1)..( 8): Result.006 file - promoters50/5671710
tatgattt

SEQ ID NO: 199760 - DNA, 8 bp, Unknown
  misc_feature (1)..( 8): Result.006 file - promoters50/5671710
gatgcttt

SEQ ID NO: 199761 - DNA, 8 bp, Unknown
  misc_feature (1)..( 8): Result.006 file - promoters50/5671710
gattcttt

SEQ ID NO: 199762 - DNA, 8 bp, Unknown
  misc_feature (1)..( 8): Result.006 file - promoters50/5671710
tcttcttt

SEQ ID NO: 199763 - DNA, 8 bp, Unknown
  misc_feature (1)..( 8): Result.006 file - promoters50/5671710
gattcttt

SEQ ID NO: 199764 - DNA, 8 bp, Unknown
  misc_feature (1)..( 8): Result.006 file - promoters50/5671840
tattctta

SEQ ID NO: 199765 - DNA, 7 bp, Unknown
  misc_feature (1)..( 7): Result.006 file - promoters50/5671840
tatatct

SEQ ID NO: 199766 - DNA, 7 bp, Unknown
  misc_feature (1)..( 7): Result.006 file - promoters50/5671840
tatgtct

SEQ ID NO: 199767 - DNA, 7 bp, Unknown
  misc_feature (1)..( 7): Result.006 file - promoters50/5671840
gatgtct

SEQ ID NO: 199768 - DNA, 12 bp, Unknown
  misc_feature (1)..( 12): Result.006 file - promoters50/5671840
aataaatagttc

SEQ ID NO: 199769 - DNA, 12 bp, Unknown
  misc_feature (1)..( 12): Result.006 file - promoters50/5671840
aataaaatcatt

SEQ ID NO: 199770 - DNA, 12 bp, Unknown
  misc_feature (1)..( 12): Result.006 file - promoters50/5671840
cataaaattaaa

SEQ ID NO: 199771 - DNA, 9 bp, Unknown
  misc_feature (1)..( 9): Result.006 file - promoters50/5671840
aatttttgg

SEQ ID NO: 199772 - DNA, 9 bp, Unknown
  misc_feature (1)..( 9): Result.006 file - promoters50/5671840
tgtttttgt

SEQ ID NO: 199773 - DNA, 9 bp, Unknown
  misc_feature (1)..( 9): Result.006 file - promoters50/5671852
tgttgttgt

SEQ ID NO: 199774 - DNA, 8 bp, Unknown
  misc_feature (1)..( 8): Result.006 file - promoters50/5671852
ttcttgcc

SEQ ID NO: 199775 - DNA, 8 bp, Unknown
  misc_feature (1)..( 8): Result.006 file - promoters50/5671852
ttctggcc

SEQ ID NO: 199776 - DNA, 8 bp, Unknown
  misc_feature (1)..( 8): Result.006 file - promoters50/5671955
gtcttgcg

SEQ ID NO: 199777 - DNA, 9 bp, Unknown
  misc_feature (1)..( 9): Result.006 file - promoters50/5671955
taattttac

SEQ ID NO: 199778 - DNA, 9 bp, Unknown
  misc_feature (1)..( 9): Result.006 file - promoters50/5671955
gaatattac

SEQ ID NO: 199779 - DNA, 9 bp, Unknown
  misc_feature (1)..( 9): Result.006 file - promoters50/5671955
taatttact

SEQ ID NO: 199780 - DNA, 9 bp, Unknown
  misc_feature (1)..( 9): Result.006 file - promoters50/5671955
caaataaaa

SEQ ID NO: 199781 - DNA, 9 bp, Unknown
  misc_feature (1)..( 9): Result.006 file - promoters50/5671955
caattaaaa

SEQ ID NO: 199782 - DNA, 10 bp, Unknown
  misc_feature (1)..( 10): Result.006 file - promoters50/5672281
atattagaaa

SEQ ID NO: 199783 - DNA, 12 bp, Unknown
  misc_feature (1)..( 12): Result.006 file - promoters50/5672281
gatggaaatgtg

SEQ ID NO: 199784 - DNA, 12 bp, Unknown
  misc_feature (1)..( 12): Result.006 file - promoters50/5672281
gttttaaaagtg

SEQ ID NO: 199785 - DNA, 12 bp, Unknown
  misc_feature (1)..( 12): Result.006 file - promoters50/5672281
ttttcaaagcaa

SEQ ID NO: 199786 - DNA, 12 bp, Unknown
  misc_feature (1)..( 12): Result.006 file - promoters50/5672661
gtttcaacaaaa

SEQ ID NO: 199787 - DNA, 6 bp, Unknown
  misc_feature (1)..( 6): Result.006 file - promoters50/5672661
catctc

SEQ ID NO: 199788 - DNA, 6 bp, Unknown
  misc_feature (1)..( 6): Result.006 file - promoters50/5672661
catctc

SEQ ID NO: 199789 - DNA, 6 bp, Unknown
  misc_feature (1)..( 6): Result.006 file - promoters50/5672792
catctc

SEQ ID NO: 199790 - DNA, 7 bp, Unknown
  misc_feature (1)..( 7): Result.006 file - promoters50/5672792
aatgtcg

SEQ ID NO: 199791 - DNA, 7 bp, Unknown
  misc_feature (1)..( 7): Result.006 file - promoters50/5672792
aatgtct

SEQ ID NO: 199792 - DNA, 7 bp, Unknown
  misc_feature (1)..( 7): Result.006 file - promoters50/5672792
aatttcg

SEQ ID NO: 199793 - DNA, 10 bp, Unknown
  misc_feature (1)..( 10): Result.006 file - promoters50/5672792
tcgattttga

SEQ ID NO: 199794 - DNA, 10 bp, Unknown
  misc_feature (1)..( 10): Result.006 file - promoters50/5672792
tgtattttgt

SEQ ID NO: 199795 - DNA, 10 bp, Unknown
  misc_feature (1)..( 10): Result.006 file - promoters50/5672792
tgtcttttgt

SEQ ID NO: 199796 - DNA, 12 bp, Unknown
  misc_feature (1)..( 12): Result.006 file - promoters50/5672792
ttatatctgtat

SEQ ID NO: 199797 - DNA, 12 bp, Unknown
  misc_feature (1)..( 12): Result.006 file - promoters50/5672792
ttagatcgtacc

SEQ ID NO: 199798 - DNA, 12 bp, Unknown
  misc_feature (1)..( 12): Result.006 file - promoters50/5672792
gaatatgtgtat

SEQ ID NO: 199799 - DNA, 12 bp, Unknown
  misc_feature (1)..( 12): Result.006 file - promoters50/5672792
atgaacttgtct

SEQ ID NO: 199800 - DNA, 12 bp, Unknown
  misc_feature (1)..( 12): Result.006 file - promoters50/5672792
acgtgtttgtct

SEQ ID NO: 199801 - DNA, 12 bp, Unknown
  misc_feature (1)..( 12): Result.006 file - promoters50/5672842
tgtattttgtgt

SEQ ID NO: 199802 - DNA, 13 bp, Unknown
  misc_feature (1)..( 13): Result.006 file - promoters50/5672842
gggcctaatgaat

SEQ ID NO: 199803 - DNA, 13 bp, Unknown
  misc_feature (1)..( 13): Result.006 file - promoters50/5672842
aggcccaatacga

SEQ ID NO: 199804 - DNA, 13 bp, Unknown
  misc_feature (1)..( 13): Result.006 file - promoters50/5672842
aagcccaataaat

SEQ ID NO: 199805 - DNA, 13 bp, Unknown
  misc_feature (1)..( 13): Result.006 file - promoters50/5672842
gtaactagtgacg

SEQ ID NO: 199806 - DNA, 13 bp, Unknown
  misc_feature (1)..( 13): Result.006 file - promoters50/5672842
aggcccaatttca

SEQ ID NO: 199807 - DNA, 13 bp, Unknown
  misc_feature (1)..( 13): Result.006 file - promoters50/5672842
gagcccatataaa

SEQ ID NO: 199808 - DNA, 12 bp, Unknown
  misc_feature (1)..( 12): Result.006 file - promoters50/5672842
aaaaagaaaaaa

SEQ ID NO: 199809 - DNA, 12 bp, Unknown
  misc_feature (1)..( 12): Result.006 file - promoters50/5672842
ttaaagaactaa

SEQ ID NO: 199810 - DNA, 12 bp, Unknown
  misc_feature (1)..( 12): Result.006 file - promoters50/5672842
aaaaataaaaaa

SEQ ID NO: 199811 - DNA, 12 bp, Unknown
  misc_feature (1)..( 12): Result.006 file - promoters50/5672842
tttaacaaatgg

SEQ ID NO: 199812 - DNA, 12 bp, Unknown
  misc_feature (1)..( 12): Result.006 file - promoters50/5672842
caaaagaaacga

SEQ ID NO: 199813 - DNA, 12 bp, Unknown
  misc_feature (1)..( 12): Result.006 file - promoters50/5672842
tgaatcaaatac

SEQ ID NO: 199814 - DNA, 10 bp, Unknown
  misc_feature (1)..( 10): Result.006 file - promoters50/5672842
gaatttgtgt

SEQ ID NO: 199815 - DNA, 10 bp, Unknown
  misc_feature (1)..( 10): Result.006 file - promoters50/5672842
aaatatgtca

SEQ ID NO: 199816 - DNA, 10 bp, Unknown
  misc_feature (1)..( 10): Result.006 file - promoters50/5672842
taatttgttt

SEQ ID NO: 199817 - DNA, 10 bp, Unknown
  misc_feature (1)..( 10): Result.006 file - promoters50/5672842
taatttgtct

SEQ ID NO: 199818 - DNA, 10 bp, Unknown
  misc_feature (1)..( 10): Result.006 file - promoters50/5672842
ctttttatct

SEQ ID NO: 199819 - DNA, 10 bp, Unknown
  misc_feature (1)..( 10): Result.006 file - promoters50/5672842
taacttgcaa

SEQ ID NO: 199820 - DNA, 12 bp, Unknown
  misc_feature (1)..( 12): Result.006 file - promoters50/5672842
aaaaaaaacttt

SEQ ID NO: 199821 - DNA, 12 bp, Unknown
  misc_feature (1)..( 12): Result.006 file - promoters50/5672842
atcaaatacttt

SEQ ID NO: 199822 - DNA, 13 bp, Unknown
  misc_feature (1)..( 13): Result.006 file - promoters50/5672842
caaaagaaacgaa

SEQ ID NO: 199823 - DNA, 13 bp, Unknown
  misc_feature (1)..( 13): Result.006 file - promoters50/5672842
aaaataaaaaaga

SEQ ID NO: 199824 - DNA, 13 bp, Unknown
  misc_feature (1)..( 13): Result.006 file - promoters50/5672842
tatttaacaaatg

SEQ ID NO: 199825 - DNA, 13 bp, Unknown
  misc_feature (1)..( 13): Result.006 file - promoters50/5672842
ttaaagaactaat

SEQ ID NO: 199826 - DNA, 13 bp, Unknown
  misc_feature (1)..( 13): Result.006 file - promoters50/5672842
tctaaattacttt

SEQ ID NO: 199827 - DNA, 12 bp, Unknown
  misc_feature (1)..( 12): Result.006 file - promoters50/5672842
gaaaaaaaaaaa

SEQ ID NO: 199828 - DNA, 12 bp, Unknown
  misc_feature (1)..( 12): Result.006 file - promoters50/5672842
caaaagaaacga

SEQ ID NO: 199829 - DNA, 12 bp, Unknown
  misc_feature (1)..( 12): Result.006 file - promoters50/5672842
aaaaataaaaaa

SEQ ID NO: 199830 - DNA, 12 bp, Unknown
  misc_feature (1)..( 12): Result.006 file - promoters50/5672842
tttaacaaatgg

SEQ ID NO: 199831 - DNA, 12 bp, Unknown
  misc_feature (1)..( 12): Result.006 file - promoters50/5672842
ttaaagaactaa

SEQ ID NO: 199832 - DNA, 12 bp, Unknown
  misc_feature (1)..( 12): Result.006 file - promoters50/5672842
tgaatcaaatac

SEQ ID NO: 199833 - DNA, 11 bp, Unknown
  misc_feature (1)..( 11): Result.006 file - promoters50/5672842
acaagaaaaaa

SEQ ID NO: 199834 - DNA, 11 bp, Unknown
  misc_feature (1)..( 11): Result.006 file - promoters50/5672842
acacgaaaaag

SEQ ID NO: 199835 - DNA, 11 bp, Unknown
  misc_feature (1)..( 11): Result.006 file - promoters50/5672842
acaagaagagc

SEQ ID NO: 199836 - DNA, 11 bp, Unknown
  misc_feature (1)..( 11): Result.006 file - promoters50/5672842
ccgagaaaaat

SEQ ID NO: 199837 - DNA, 11 bp, Unknown
  misc_feature (1)..( 11): Result.006 file - promoters50/5672842
atgagaaaata

SEQ ID NO: 199838 - DNA, 11 bp, Unknown
  misc_feature (1)..( 11): Result.006 file - promoters50/5672872
actgcaaaaaa

SEQ ID NO: 199839 - DNA, 8 bp, Unknown
  misc_feature (1)..( 8): Result.006 file - promoters50/5672872
attagaga

SEQ ID NO: 199840 - DNA, 8 bp, Unknown
  misc_feature (1)..( 8): Result.006 file - promoters50/5672872
attagaat

SEQ ID NO: 199841 - DNA, 8 bp, Unknown
  misc_feature (1)..( 8): Result.006 file - promoters50/5672872
attaaaat

SEQ ID NO: 199842 - DNA, 11 bp, Unknown
  misc_feature (1)..( 11): Result.006 file - promoters50/5672872
agaatcacctc

SEQ ID NO: 199843 - DNA, 11 bp, Unknown
  misc_feature (1)..( 11): Result.006 file - promoters50/5672872
agactcatctc

SEQ ID NO: 199844 - DNA, 11 bp, Unknown
  misc_feature (1)..( 11): Result.006 file - promoters50/5672872
aaactcataga

SEQ ID NO: 199845 - DNA, 10 bp, Unknown
  misc_feature (1)..( 10): Result.006 file - promoters50/5672872
ttttattttc

SEQ ID NO: 199846 - DNA, 10 bp, Unknown
  misc_feature (1)..( 10): Result.006 file - promoters50/5672872
ttttataaca

SEQ ID NO: 199847 - DNA, 10 bp, Unknown
  misc_feature (1)..( 10): Result.006 file - promoters50/5672872
ttttattata

SEQ ID NO: 199848 - DNA, 17 bp, Unknown
  misc_feature (1)..( 17): Result.006 file - promoters50/5672872
ttttgttttgtattttt

SEQ ID NO: 199849 - DNA, 17 bp, Unknown
  misc_feature (1)..( 17): Result.006 file - promoters50/5672872
acttgtttgagatagcc

SEQ ID NO: 199850 - DNA, 17 bp, Unknown
  misc_feature (1)..( 17): Result.006 file - promoters50/5672872
ttttattttttttattt

SEQ ID NO: 199851 - DNA, 17 bp, Unknown
  misc_feature (1)..( 17): Result.006 file - promoters50/5672872
ttttaatttagcgttaa

SEQ ID NO: 199852 - DNA, 9 bp, Unknown
  misc_feature (1)..( 9): Result.006 file - promoters50/5672872
tcgcacaga

SEQ ID NO: 199853 - DNA, 9 bp, Unknown
  misc_feature (1)..( 9): Result.006 file - promoters50/5672872
acgcataga

SEQ ID NO: 199854 - DNA, 9 bp, Unknown
  misc_feature (1)..( 9): Result.006 file - promoters50/5672872
acgtataac

SEQ ID NO: 199855 - DNA, 9 bp, Unknown
  misc_feature (1)..( 9): Result.006 file - promoters50/5672872
tgaattatt

SEQ ID NO: 199856 - DNA, 9 bp, Unknown
  misc_feature (1)..( 9): Result.006 file - promoters50/5672872
gaaattatt

SEQ ID NO: 199857 - DNA, 9 bp, Unknown
  misc_feature (1)..( 9): Result.006 file - promoters50/5672872
ttaatttag

SEQ ID NO: 199858 - DNA, 13 bp, Unknown
  misc_feature (1)..( 13): Result.006 file - promoters50/5672872
gccgttttaattt

SEQ ID NO: 199859 - DNA, 13 bp, Unknown
  misc_feature (1)..( 13): Result.006 file - promoters50/5672872
gccgtattaaagt

SEQ ID NO: 199860 - DNA, 13 bp, Unknown
  misc_feature (1)..( 13): Result.006 file - promoters50/5673089
attattttatttt

SEQ ID NO: 199861 - DNA, 7 bp, Unknown
  misc_feature (1)..( 7): Result.006 file - promoters50/5673089
tttctta

SEQ ID NO: 199862 - DNA, 7 bp, Unknown
  misc_feature (1)..( 7): Result.006 file - promoters50/5673089
tttatta

SEQ ID NO: 199863 - DNA, 7 bp, Unknown
  misc_feature (1)..( 7): Result.006 file - promoters50/5673089
attatta

SEQ ID NO: 199864 - DNA, 11 bp, Unknown
  misc_feature (1)..( 11): Result.006 file - promoters50/5673089
cctgcacaaaa

SEQ ID NO: 199865 - DNA, 11 bp, Unknown
  misc_feature (1)..( 11): Result.006 file - promoters50/5673089
ccctcacaaaa

SEQ ID NO: 199866 - DNA, 11 bp, Unknown
  misc_feature (1)..( 11): Result.006 file - promoters50/5673089
cctgctcaagg

SEQ ID NO: 199867 - DNA, 11 bp, Unknown
  misc_feature (1)..( 11): Result.006 file - promoters50/5673089
tatgagtattt

SEQ ID NO: 199868 - DNA, 11 bp, Unknown
  misc_feature (1)..( 11): Result.006 file - promoters50/5673089
tatgattatta

SEQ ID NO: 199869 - DNA, 11 bp, Unknown
  misc_feature (1)..( 11): Result.006 file - promoters50/5673348
tagatttatta

SEQ ID NO: 199870 - DNA, 13 bp, Unknown
  misc_feature (1)..( 13): Result.006 file - promoters50/5673348
aatgttatttttc

SEQ ID NO: 199871 - DNA, 13 bp, Unknown
  misc_feature (1)..( 13): Result.006 file - promoters50/5673348
tttgtcattatgt

SEQ ID NO: 199872 - DNA, 13 bp, Unknown
  misc_feature (1)..( 13): Result.006 file - promoters50/5673348
aatgttgtttata

SEQ ID NO: 199873 - DNA, 13 bp, Unknown
  misc_feature (1)..( 13): Result.006 file - promoters50/5673348
ccatttgtttata

SEQ ID NO: 199874 - DNA, 8 bp, Unknown
  misc_feature (1)..( 8): Result.006 file - promoters50/5673348
aaatattt

SEQ ID NO: 199875 - DNA, 8 bp, Unknown
  misc_feature (1)..( 8): Result.006 file - promoters50/5673348
taatgttt

SEQ ID NO: 199876 - DNA, 8 bp, Unknown
  misc_feature (1)..( 8): Result.006 file - promoters50/5673348
aaatatag

SEQ ID NO: 199877 - DNA, 9 bp, Unknown
  misc_feature (1)..( 9): Result.006 file - promoters50/5673348
atcatcaac

SEQ ID NO: 199878 - DNA, 9 bp, Unknown
  misc_feature (1)..( 9): Result.006 file - promoters50/5673348
taaatcaac

SEQ ID NO: 199879 - DNA, 9 bp, Unknown
  misc_feature (1)..( 9): Result.006 file - promoters50/5673348
taaaacaat

SEQ ID NO: 199880 - DNA, 9 bp, Unknown
  misc_feature (1)..( 9): Result.006 file - promoters50/5673348
ctatagtat

SEQ ID NO: 199881 - DNA, 9 bp, Unknown
  misc_feature (1)..( 9): Result.006 file - promoters50/5673348
ctaaagtat

SEQ ID NO: 199882 - DNA, 9 bp, Unknown
  misc_feature (1)..( 9): Result.006 file - promoters50/5673348
ccataatat

SEQ ID NO: 199883 - DNA, 8 bp, Unknown
  misc_feature (1)..( 8): Result.006 file - promoters50/5673348
caaacaat

SEQ ID NO: 199884 - DNA, 8 bp, Unknown
  misc_feature (1)..( 8): Result.006 file - promoters50/5673348
aaaacaat

SEQ ID NO: 199885 - DNA, 9 bp, Unknown
  misc_feature (1)..( 9): Result.006 file - promoters50/5673348
taaatcaac

SEQ ID NO: 199886 - DNA, 8 bp, Unknown
  misc_feature (1)..( 8): Result.006 file - promoters50/5673348
attcaata

SEQ ID NO: 199887 - DNA, 8 bp, Unknown
  misc_feature (1)..( 8): Result.006 file - promoters50/5673348
tttctata

SEQ ID NO: 199888 - DNA, 8 bp, Unknown
  misc_feature (1)..( 8): Result.006 file - promoters50/5673514
tttatata

SEQ ID NO: 199889 - DNA, 11 bp, Unknown
  misc_feature (1)..( 11): Result.006 file - promoters50/5673514
ataaattaata

SEQ ID NO: 199890 - DNA, 11 bp, Unknown
  misc_feature (1)..( 11): Result.006 file - promoters50/5673514
ccaaattaaat

SEQ ID NO: 199891 - DNA, 11 bp, Unknown
  misc_feature (1)..( 11): Result.006 file - promoters50/5673650
atagattcata

SEQ ID NO: 199892 - DNA, 11 bp, Unknown
  misc_feature (1)..( 11): Result.006 file - promoters50/5673650
aaaatgtgatc

SEQ ID NO: 199893 - DNA, 11 bp, Unknown
  misc_feature (1)..( 11): Result.006 file - promoters50/5673650
aaaatgctact

SEQ ID NO: 199894 - DNA, 11 bp, Unknown
  misc_feature (1)..( 11): Result.006 file - promoters50/5673650
caaatcgaaat

SEQ ID NO: 199895 - DNA, 11 bp, Unknown
  misc_feature (1)..( 11): Result.006 file - promoters50/5673650
tccatcgaatt

SEQ ID NO: 199896 - DNA, 11 bp, Unknown
  misc_feature (1)..( 11): Result.006 file - promoters50/5673650
gcattcgaaaa

SEQ ID NO: 199897 - DNA, 11 bp, Unknown
  misc_feature (1)..( 11): Result.006 file - promoters50/5673674
taaatcctaac

SEQ ID NO: 199898 - DNA, 11 bp, Unknown
  misc_feature (1)..( 11): Result.006 file - promoters50/5673674
aaaacaacaga

SEQ ID NO: 199899 - DNA, 11 bp, Unknown
  misc_feature (1)..( 11): Result.006 file - promoters50/5673674
caaataacaaa

SEQ ID NO: 199900 - DNA, 11 bp, Unknown
  misc_feature (1)..( 11): Result.006 file - promoters50/5673674
taaacaaaagg

SEQ ID NO: 199901 - DNA, 11 bp, Unknown
  misc_feature (1)..( 11): Result.006 file - promoters50/5673674
ataattacaat

SEQ ID NO: 199902 - DNA, 11 bp, Unknown
  misc_feature (1)..( 11): Result.006 file - promoters50/5673674
ggaacaaagaa

SEQ ID NO: 199903 - DNA, 12 bp, Unknown
  misc_feature (1)..( 12): Result.006 file - promoters50/5673674
ggaacgaagaag

SEQ ID NO: 199904 - DNA, 12 bp, Unknown
  misc_feature (1)..( 12): Result.006 file - promoters50/5673674
taaatttacaaa

SEQ ID NO: 199905 - DNA, 12 bp, Unknown
  misc_feature (1)..( 12): Result.006 file - promoters50/5673674
cacttttaaaaa

SEQ ID NO: 199906 - DNA, 10 bp, Unknown
  misc_feature (1)..( 10): Result.006 file - promoters50/5673674
attaattaag

SEQ ID NO: 199907 - DNA, 10 bp, Unknown
  misc_feature (1)..( 10): Result.006 file - promoters50/5673674
tttaagtaaa

SEQ ID NO: 199908 - DNA, 10 bp, Unknown
  misc_feature (1)..( 10): Result.006 file - promoters50/5673674
gtcaatgaat

SEQ ID NO: 199909 - DNA, 10 bp, Unknown
  misc_feature (1)..( 10): Result.006 file - promoters50/5673674
atcaaagaat

SEQ ID NO: 199910 - DNA, 10 bp, Unknown
  misc_feature (1)..( 10): Result.006 file - promoters50/5673674
tagaaagaaa

SEQ ID NO: 199911 - DNA, 10 bp, Unknown
  misc_feature (1)..( 10): Result.006 file - promoters50/5673674
tagaacgaac

SEQ ID NO: 199912 - DNA, 10 bp, Unknown
  misc_feature (1)..( 10): Result.006 file - promoters50/5673674
gacaaaaaaa

SEQ ID NO: 199913 - DNA, 14 bp, Unknown
  misc_feature (1)..( 14): Result.006 file - promoters50/5673674
ttaaacaaaaaaaa

SEQ ID NO: 199914 - DNA, 14 bp, Unknown
  misc_feature (1)..( 14): Result.006 file - promoters50/5673674
gtaaagaaaaaagc

SEQ ID NO: 199915 - DNA, 14 bp, Unknown
  misc_feature (1)..( 14): Result.006 file - promoters50/5673674
agaaataaataatt

SEQ ID NO: 199916 - DNA, 14 bp, Unknown
  misc_feature (1)..( 14): Result.006 file - promoters50/5673674
agaaagaaattaaa

SEQ ID NO: 199917 - DNA, 14 bp, Unknown
  misc_feature (1)..( 14): Result.006 file - promoters50/5673674
gtggacaaaaaaaa

SEQ ID NO: 199918 - DNA, 14 bp, Unknown
  misc_feature (1)..( 14): Result.006 file - promoters50/5673674
tcaaagaatcgttg

SEQ ID NO: 199919 - DNA, 14 bp, Unknown
  misc_feature (1)..( 14): Result.006 file - promoters50/5673773
tagaacgaacaggt

SEQ ID NO: 199920 - DNA, 10 bp, Unknown
  misc_feature (1)..( 10): Result.006 file - promoters50/5673773
ccataaactt

SEQ ID NO: 199921 - DNA, 10 bp, Unknown
  misc_feature (1)..( 10): Result.006 file - promoters50/5673773
acataaactt

SEQ ID NO: 199922 - DNA, 10 bp, Unknown
  misc_feature (1)..( 10): Result.006 file - promoters50/5673796
acaaaaaaac

SEQ ID NO: 199923 - DNA, 11 bp, Unknown
  misc_feature (1)..( 11): Result.006 file - promoters50/5673796
gtaattacaat

SEQ ID NO: 199924 - DNA, 11 bp, Unknown
  misc_feature (1)..( 11): Result.006 file - promoters50/5673796
ttggttagaat

SEQ ID NO: 199925 - DNA, 11 bp, Unknown
  misc_feature (1)..( 11): Result.006 file - promoters50/5673796
ttgggtagatg

SEQ ID NO: 199926 - DNA, 8 bp, Unknown
  misc_feature (1)..( 8): Result.006 file - promoters50/5673796
ttttatat

SEQ ID NO: 199927 - DNA, 8 bp, Unknown
  misc_feature (1)..( 8): Result.006 file - promoters50/5673796
ttttattt

SEQ ID NO: 199928 - DNA, 8 bp, Unknown
  misc_feature (1)..( 8): Result.006 file - promoters50/5674194
ctttcttt

SEQ ID NO: 199929 - DNA, 11 bp, Unknown
  misc_feature (1)..( 11): Result.006 file - promoters50/5674194
cataaaaaatt

SEQ ID NO: 199930 - DNA, 11 bp, Unknown
  misc_feature (1)..( 11): Result.006 file - promoters50/5674194
aagaaaaaaaa

SEQ ID NO: 199931 - DNA, 11 bp, Unknown
  misc_feature (1)..( 11): Result.006 file - promoters50/5674194
aataaaaacag

SEQ ID NO: 199932 - DNA, 11 bp, Unknown
  misc_feature (1)..( 11): Result.006 file - promoters50/5674194
catataaaatg

SEQ ID NO: 199933 - DNA, 11 bp, Unknown
  misc_feature (1)..( 11): Result.006 file - promoters50/5674194
atgaaatattt

SEQ ID NO: 199934 - DNA, 12 bp, Unknown
  misc_feature (1)..( 12): Result.006 file - promoters50/5674194
attaaagaaaag

SEQ ID NO: 199935 - DNA, 12 bp, Unknown
  misc_feature (1)..( 12): Result.006 file - promoters50/5674194
tttataataaca

SEQ ID NO: 199936 - DNA, 17 bp, Unknown
  misc_feature (1)..( 17): Result.006 file - promoters50/5674194
aataattaaagtttaat

SEQ ID NO: 199937 - DNA, 17 bp, Unknown
  misc_feature (1)..( 17): Result.006 file - promoters50/5674194
aacaatgaaagggattc

SEQ ID NO: 199938 - DNA, 17 bp, Unknown
  misc_feature (1)..( 17): Result.006 file - promoters50/5674194
aatcattaatccttgtc

SEQ ID NO: 199939 - DNA, 17 bp, Unknown
  misc_feature (1)..( 17): Result.006 file - promoters50/5674194
gttcttgagagggtttc

SEQ ID NO: 199940 - DNA, 17 bp, Unknown
  misc_feature (1)..( 17): Result.006 file - promoters50/5674194
atacttcagaacaccac

SEQ ID NO: 199941 - DNA, 17 bp, Unknown
  misc_feature (1)..( 17): Result.006 file - promoters50/5674194
accaatcataaaagttt

SEQ ID NO: 199942 - DNA, 17 bp, Unknown
  misc_feature (1)..( 17): Result.006 file - promoters50/5674530
attaatgaatggtgata

SEQ ID NO: 199943 - DNA, 13 bp, Unknown
  misc_feature (1)..( 13): Result.006 file - promoters50/5674530
attaccaaataaa

SEQ ID NO: 199944 - DNA, 13 bp, Unknown
  misc_feature (1)..( 13): Result.006 file - promoters50/5674530
atatccaaataaa

SEQ ID NO: 199945 - DNA, 13 bp, Unknown
  misc_feature (1)..( 13): Result.006 file - promoters50/5674530
aatcaaaaataac

SEQ ID NO: 199946 - DNA, 13 bp, Unknown
  misc_feature (1)..( 13): Result.006 file - promoters50/5674530
tttaacaaaactt

SEQ ID NO: 199947 - DNA, 13 bp, Unknown
  misc_feature (1)..( 13): Result.006 file - promoters50/5674530
tttaaccgattaa

SEQ ID NO: 199948 - DNA, 9 bp, Unknown
  misc_feature (1)..( 9): Result.006 file - promoters50/5674530
agaacaaac

SEQ ID NO: 199949 - DNA, 9 bp, Unknown
  misc_feature (1)..( 9): Result.006 file - promoters50/5674530
agaaaaaaa

SEQ ID NO: 199950 - DNA, 9 bp, Unknown
  misc_feature (1)..( 9): Result.006 file - promoters50/5674530
ttaacaaac

SEQ ID NO: 199951 - DNA, 9 bp, Unknown
  misc_feature (1)..( 9): Result.006 file - promoters50/5674530
agaccaaag

SEQ ID NO: 199952 - DNA, 9 bp, Unknown
  misc_feature (1)..( 9): Result.006 file - promoters50/5674626
tgaacaaac

SEQ ID NO: 199953 - DNA, 9 bp, Unknown
  misc_feature (1)..( 9): Result.006 file - promoters50/5674626
gaatcaata

SEQ ID NO: 199954 - DNA, 9 bp, Unknown
  misc_feature (1)..( 9): Result.006 file - promoters50/5674626
aaataaatt

SEQ ID NO: 199955 - DNA, 9 bp, Unknown
  misc_feature (1)..( 9): Result.006 file - promoters50/5674626
gaatcagag

SEQ ID NO: 199956 - DNA, 9 bp, Unknown
  misc_feature (1)..( 9): Result.006 file - promoters50/5674634
acatagatt

SEQ ID NO: 199957 - DNA, 9 bp, Unknown
  misc_feature (1)..( 9): Result.006 file - promoters50/5674634
aaaatgtga

SEQ ID NO: 199958 - DNA, 9 bp, Unknown
  misc_feature (1)..( 9): Result.006 file - promoters50/5674634
ctaatgtga

SEQ ID NO: 199959 - DNA, 9 bp, Unknown
  misc_feature (1)..( 9): Result.006 file - promoters50/5674634
aaaatttga

SEQ ID NO: 199960 - DNA, 9 bp, Unknown
  misc_feature (1)..( 9): Result.006 file - promoters50/5674634
ttaatgtct

SEQ ID NO: 199961 - DNA, 9 bp, Unknown
  misc_feature (1)..( 9): Result.006 file - promoters50/5674634
taaattttg

SEQ ID NO: 199962 - DNA, 9 bp, Unknown
  misc_feature (1)..( 9): Result.006 file - promoters50/5674634
tatattttg

SEQ ID NO: 199963 - DNA, 11 bp, Unknown
  misc_feature (1)..( 11): Result.006 file - promoters50/5674634
ataaaatgtga

SEQ ID NO: 199964 - DNA, 11 bp, Unknown
  misc_feature (1)..( 11): Result.006 file - promoters50/5674634
gtaacatggcg

SEQ ID NO: 199965 - DNA, 11 bp, Unknown
  misc_feature (1)..( 11): Result.006 file - promoters50/5674634
tcaaaatttga

SEQ ID NO: 199966 - DNA, 11 bp, Unknown
  misc_feature (1)..( 11): Result.006 file - promoters50/5674634
ataaaaacggg

SEQ ID NO: 199967 - DNA, 11 bp, Unknown
  misc_feature (1)..( 11): Result.006 file - promoters50/5674634
attaaattttg

SEQ ID NO: 199968 - DNA, 11 bp, Unknown
  misc_feature (1)..( 11): Result.006 file - promoters50/5674634
tgtatattttg

SEQ ID NO: 199969 - DNA, 12 bp, Unknown
  misc_feature (1)..( 12): Result.006 file - promoters50/5674634
tttagattgaag

SEQ ID NO: 199970 - DNA, 12 bp, Unknown
  misc_feature (1)..( 12): Result.006 file - promoters50/5674634
tttggattttga

SEQ ID NO: 199971 - DNA, 12 bp, Unknown
  misc_feature (1)..( 12): Result.006 file - promoters50/5674634
tttacatttaga

SEQ ID NO: 199972 - DNA, 12 bp, Unknown
  misc_feature (1)..( 12): Result.006 file - promoters50/5674634
attggatttctt

SEQ ID NO: 199973 - DNA, 12 bp, Unknown
  misc_feature (1)..( 12): Result.006 file - promoters50/5674634
tctacctttttt

SEQ ID NO: 199974 - DNA, 12 bp, Unknown
  misc_feature (1)..( 12): Result.006 file - promoters50/5674634
tcacccttcttt

SEQ ID NO: 199975 - DNA, 16 bp, Unknown
  misc_feature (1)..( 16): Result.006 file - promoters50/5674634
tgatttcgtgattgaa

SEQ ID NO: 199976 - DNA, 16 bp, Unknown
  misc_feature (1)..( 16): Result.006 file - promoters50/5674634
taatttcctgaaccct

SEQ ID NO: 199977 - DNA, 16 bp, Unknown
  misc_feature (1)..( 16): Result.006 file - promoters50/5674634
tgaattctttcaaaat

SEQ ID NO: 199978 - DNA, 16 bp, Unknown
  misc_feature (1)..( 16): Result.006 file - promoters50/5674634
tggtctcgagatggaa

SEQ ID NO: 199979 - DNA, 14 bp, Unknown
  misc_feature (1)..( 14): Result.006 file - promoters50/5674634
atttcctagataca

SEQ ID NO: 199980 - DNA, 16 bp, Unknown
  misc_feature (1)..( 16): Result.006 file - promoters50/5674634
aaaaaacgaatggcaa

SEQ ID NO: 199981 - DNA, 16 bp, Unknown
  misc_feature (1)..( 16): Result.006 file - promoters50/5674666
atcaaacaaatcaaat

SEQ ID NO: 199982 - DNA, 10 bp, Unknown
  misc_feature (1)..( 10): Result.006 file - promoters50/5674666
gccaaagaga

SEQ ID NO: 199983 - DNA, 10 bp, Unknown
  misc_feature (1)..( 10): Result.006 file - promoters50/5674666
ctttaagaga

SEQ ID NO: 199984 - DNA, 10 bp, Unknown
  misc_feature (1)..( 10): Result.006 file - promoters50/5674666
aattaaaaga

SEQ ID NO: 199985 - DNA, 10 bp, Unknown
  misc_feature (1)..( 10): Result.006 file - promoters50/5674666
ttttaaaaaa

SEQ ID NO: 199986 - DNA, 10 bp, Unknown
  misc_feature (1)..( 10): Result.006 file - promoters50/5674666
aattaaaatt

SEQ ID NO: 199987 - DNA, 10 bp, Unknown
  misc_feature (1)..( 10): Result.006 file - promoters50/5674666
aattaatcac

SEQ ID NO: 199988 - DNA, 15 bp, Unknown
  misc_feature (1)..( 15): Result.006 file - promoters50/5674666
ttttcatttaattga

SEQ ID NO: 199989 - DNA, 15 bp, Unknown
  misc_feature (1)..( 15): Result.006 file - promoters50/5674666
ggagatttttatttg

SEQ ID NO: 199990 - DNA, 15 bp, Unknown
  misc_feature (1)..( 15): Result.006 file - promoters50/5674666
taaaaattcaatttg

SEQ ID NO: 199991 - DNA, 15 bp, Unknown
  misc_feature (1)..( 15): Result.006 file - promoters50/5674666
tctaccttttttttg

SEQ ID NO: 199992 - DNA, 15 bp, Unknown
  misc_feature (1)..( 15): Result.006 file - promoters50/5674666
tctacgttttttcac

SEQ ID NO: 199993 - DNA, 15 bp, Unknown
  misc_feature (1)..( 15): Result.006 file - promoters50/5674666
actacgtgcttccaa

SEQ ID NO: 199994 - DNA, 8 bp, Unknown
  misc_feature (1)..( 8): Result.006 file - promoters50/5674666
atataaat

SEQ ID NO: 199995 - DNA, 8 bp, Unknown
  misc_feature (1)..( 8): Result.006 file - promoters50/5674666
atataaaa

SEQ ID NO: 199996 - DNA, 8 bp, Unknown
  misc_feature (1)..( 8): Result.006 file - promoters50/5674666
atataaat

SEQ ID NO: 199997 - DNA, 8 bp, Unknown
  misc_feature (1)..( 8): Result.006 file - promoters50/5674666
atataaat

SEQ ID NO: 199998 - DNA, 8 bp, Unknown
  misc_feature (1)..( 8): Result.006 file - promoters50/5674666
atagaaag

SEQ ID NO: 199999 - DNA, 8 bp, Unknown
  misc_feature (1)..( 8): Result.006 file - promoters50/5675330
ctataaaa

SEQ ID NO: 200000 - DNA, 10 bp, Unknown
  misc_feature (1)..( 10): Result.006 file - promoters50/5675330
tttgtggtaa

SEQ ID NO: 200001 - DNA, 10 bp, Unknown
  misc_feature (1)..( 10): Result.006 file - promoters50/5675330
agtgttgtaa

SEQ ID NO: 200002 - DNA, 10 bp, Unknown
  misc_feature (1)..( 10): Result.006 file - promoters50/5675330
tttttggtga

SEQ ID NO: 200003 - DNA, 6 bp, Unknown
  misc_feature (1)..( 6): Result.006 file - promoters50/5675330
catgtt

SEQ ID NO: 200004 - DNA, 6 bp, Unknown
  misc_feature (1)..( 6): Result.006 file - promoters50/5675330
catgtt

SEQ ID NO: 200005 - DNA, 6 bp, Unknown
  misc_feature (1)..( 6): Result.006 file - promoters50/5675583
catgtt

SEQ ID NO: 200006 - DNA, 7 bp, Unknown
  misc_feature (1)..( 7): Result.006 file - promoters50/5675583
aaaaatt

SEQ ID NO: 200007 - DNA, 7 bp, Unknown
  misc_feature (1)..( 7): Result.006 file - promoters50/5675583
aaaaatt

SEQ ID NO: 200008 - DNA, 7 bp, Unknown
  misc_feature (1)..( 7): Result.006 file - promoters50/5675583
aaacatt

SEQ ID NO: 200009 - DNA, 8 bp, Unknown
  misc_feature (1)..( 8): Result.006 file - promoters50/5675583
taatgaac

SEQ ID NO: 200010 - DNA, 8 bp, Unknown
  misc_feature (1)..( 8): Result.006 file - promoters50/5675583
caataaac

SEQ ID NO: 200011 - DNA, 8 bp, Unknown
  misc_feature (1)..( 8): Result.006 file - promoters50/5675583
caaaaaaa

SEQ ID NO: 200012 - DNA, 9 bp, Unknown
  misc_feature (1)..( 9): Result.006 file - promoters50/5675583
atgaattgg

SEQ ID NO: 200013 - DNA, 9 bp, Unknown
  misc_feature (1)..( 9): Result.006 file - promoters50/5675583
atgatttgg

SEQ ID NO: 200014 - DNA, 9 bp, Unknown
  misc_feature (1)..( 9): Result.006 file - promoters50/5675583
atgattgga

SEQ ID NO: 200015 - DNA, 8 bp, Unknown
  misc_feature (1)..( 8): Result.006 file - promoters50/5675583
gaaactgc

SEQ ID NO: 200016 - DNA, 8 bp, Unknown
  misc_feature (1)..( 8): Result.006 file - promoters50/5675583
aaaactgc

SEQ ID NO: 200017 - DNA, 8 bp, Unknown
  misc_feature (1)..( 8): Result.006 file - promoters50/5675628
aaaactct

SEQ ID NO: 200018 - DNA, 8 bp, Unknown
  misc_feature (1)..( 8): Result.006 file - promoters50/5675628
ggctttgt

SEQ ID NO: 200019 - DNA, 8 bp, Unknown
  misc_feature (1)..( 8): Result.006 file - promoters50/5675628
ttctttgt

SEQ ID NO: 200020 - DNA, 8 bp, Unknown
  misc_feature (1)..( 8): Result.006 file - promoters50/5675628
tactttgt

SEQ ID NO: 200021 - DNA, 8 bp, Unknown
  misc_feature (1)..( 8): Result.006 file - promoters50/5675628
gtctctgt

SEQ ID NO: 200022 - DNA, 8 bp, Unknown
  misc_feature (1)..( 8): Result.006 file - promoters50/5675628
taccttga

SEQ ID NO: 200023 - DNA, 8 bp, Unknown
  misc_feature (1)..( 8): Result.006 file - promoters50/5675661
ctccttga

SEQ ID NO: 200024 - DNA, 12 bp, Unknown
  misc_feature (1)..( 12): Result.006 file - promoters50/5675661
atggatttattc

SEQ ID NO: 200025 - DNA, 12 bp, Unknown
  misc_feature (1)..( 12): Result.006 file - promoters50/5675661
ttggattttgaa

SEQ ID NO: 200026 - DNA, 12 bp, Unknown
  misc_feature (1)..( 12): Result.006 file - promoters50/5675661
ttggatttaaca

SEQ ID NO: 200027 - DNA, 13 bp, Unknown
  misc_feature (1)..( 13): Result.006 file - promoters50/5675661
ttggaatttggaa

SEQ ID NO: 200028 - DNA, 13 bp, Unknown
  misc_feature (1)..( 13): Result.006 file - promoters50/5675661
tttacatttagat

SEQ ID NO: 200029 - DNA, 13 bp, Unknown
  misc_feature (1)..( 13): Result.006 file - promoters50/5675661
cagttattttgaa

SEQ ID NO: 200030 - DNA, 13 bp, Unknown
  misc_feature (1)..( 13): Result.006 file - promoters50/5675661
tttgaattttttt

SEQ ID NO: 200031 - DNA, 13 bp, Unknown
  misc_feature (1)..( 13): Result.006 file - promoters50/5675661
acctaaaagattt

SEQ ID NO: 200032 - DNA, 13 bp, Unknown
  misc_feature (1)..( 13): Result.006 file - promoters50/5675661
gaagataagattg

SEQ ID NO: 200033 - DNA, 13 bp, Unknown
  misc_feature (1)..( 13): Result.006 file - promoters50/5675661
acaaaaaagatgt

SEQ ID NO: 200034 - DNA, 13 bp, Unknown
  misc_feature (1)..( 13): Result.006 file - promoters50/5675661
ggttttaaaattt

SEQ ID NO: 200035 - DNA, 13 bp, Unknown
  misc_feature (1)..( 13): Result.006 file - promoters50/5675661
ttttgaaagaagg

SEQ ID NO: 200036 - DNA, 13 bp, Unknown
  misc_feature (1)..( 13): Result.006 file - promoters50/5675661
tgttgaaacttga

SEQ ID NO: 200037 - DNA, 13 bp, Unknown
  misc_feature (1)..( 13): Result.006 file - promoters50/5676027
gtgacaaaggtgt

SEQ ID NO: 200038 - DNA, 11 bp, Unknown
  misc_feature (1)..( 11): Result.006 file - promoters50/5676027
ctaatttccaa

SEQ ID NO: 200039 - DNA, 11 bp, Unknown
  misc_feature (1)..( 11): Result.006 file - promoters50/5676027
aaaatttcaaa

SEQ ID NO: 200040 - DNA, 11 bp, Unknown
  misc_feature (1)..( 11): Result.006 file - promoters50/5676027
ctaatttgtca

SEQ ID NO: 200041 - DNA, 11 bp, Unknown
  misc_feature (1)..( 11): Result.006 file - promoters50/5676027
ctattttccaa

SEQ ID NO: 200042 - DNA, 11 bp, Unknown
  misc_feature (1)..( 11): Result.006 file - promoters50/5676027
ttaatttcaat

SEQ ID NO: 200043 - DNA, 11 bp, Unknown
  misc_feature (1)..( 11): Result.006 file - promoters50/5676027
ttaacttcatc

SEQ ID NO: 200044 - DNA, 17 bp, Unknown
  misc_feature (1)..( 17): Result.006 file - promoters50/5676027
aaacttaatttcaatct

SEQ ID NO: 200045 - DNA, 17 bp, Unknown
  misc_feature (1)..( 17): Result.006 file - promoters50/5676027
aaaattaagttcaaaaa

SEQ ID NO: 200046 - DNA, 17 bp, Unknown
  misc_feature (1)..( 17): Result.006 file - promoters50/5676027
atttaaaatttcaaatg

SEQ ID NO: 200047 - DNA, 17 bp, Unknown
  misc_feature (1)..( 17): Result.006 file - promoters50/5676027
attgttaacttcatcat

SEQ ID NO: 200048 - DNA, 17 bp, Unknown
  misc_feature (1)..( 17): Result.006 file - promoters50/5676027
tgtcagaatgtcaggct

SEQ ID NO: 200049 - DNA, 18 bp, Unknown
  misc_feature (1)..( 18): Result.006 file - promoters50/5676160
aactctattttccaatga

SEQ ID NO: 200050 - DNA, 8 bp, Unknown
  misc_feature (1)..( 8): Result.006 file - promoters50/5676160
atttaact

SEQ ID NO: 200051 - DNA, 8 bp, Unknown
  misc_feature (1)..( 8): Result.006 file - promoters50/5676160
atttaaat

SEQ ID NO: 200052 - DNA, 8 bp, Unknown
  misc_feature (1)..( 8): Result.006 file - promoters50/5676160
atttaatg

SEQ ID NO: 200053 - DNA, 9 bp, Unknown
  misc_feature (1)..( 9): Result.006 file - promoters50/5676160
ttttgaata

SEQ ID NO: 200054 - DNA, 9 bp, Unknown
  misc_feature (1)..( 9): Result.006 file - promoters50/5676160
tttttgata

SEQ ID NO: 200055 - DNA, 9 bp, Unknown
  misc_feature (1)..( 9): Result.006 file - promoters50/5676160
aatttgatt

SEQ ID NO: 200056 - DNA, 11 bp, Unknown
  misc_feature (1)..( 11): Result.006 file - promoters50/5676160
gtgtgatttaa

SEQ ID NO: 200057 - DNA, 11 bp, Unknown
  misc_feature (1)..( 11): Result.006 file - promoters50/5676160
gtgtgttttga

SEQ ID NO: 200058 - DNA, 11 bp, Unknown
  misc_feature (1)..( 11): Result.006 file - promoters50/5676160
ttgtgatactc

SEQ ID NO: 200059 - DNA, 11 bp, Unknown
  misc_feature (1)..( 11): Result.006 file - promoters50/5676160
atttgatttta

SEQ ID NO: 200060 - DNA, 11 bp, Unknown
  misc_feature (1)..( 11): Result.006 file - promoters50/5676160
agctgatataa

SEQ ID NO: 200061 - DNA, 11 bp, Unknown
  misc_feature (1)..( 11): Result.006 file - promoters50/5676160
ttttgatatga

SEQ ID NO: 200062 - DNA, 17 bp, Unknown
  misc_feature (1)..( 17): Result.006 file - promoters50/5676160
tttttttttttttgtct

SEQ ID NO: 200063 - DNA, 17 bp, Unknown
  misc_feature (1)..( 17): Result.006 file - promoters50/5676160
acagtataattttgtta

SEQ ID NO: 200064 - DNA, 17 bp, Unknown
  misc_feature (1)..( 17): Result.006 file - promoters50/5676160
ttaagtaaattttcttg

SEQ ID NO: 200065 - DNA, 17 bp, Unknown
  misc_feature (1)..( 17): Result.006 file - promoters50/5676160
taaagcaaattttcact

SEQ ID NO: 200066 - DNA, 17 bp, Unknown
  misc_feature (1)..( 17): Result.006 file - promoters50/5676160
tataataaattttttcc

SEQ ID NO: 200067 - DNA, 17 bp, Unknown
  misc_feature (1)..( 17): Result.006 file - promoters50/5676160
taaagcaaaacacatac

SEQ ID NO: 200068 - DNA, 15 bp, Unknown
  misc_feature (1)..( 15): Result.006 file - promoters50/5676160
aaagtttatttagta

SEQ ID NO: 200069 - DNA, 15 bp, Unknown
  misc_feature (1)..( 15): Result.006 file - promoters50/5676160
atagtttatggaaaa

SEQ ID NO: 200070 - DNA, 15 bp, Unknown
  misc_feature (1)..( 15): Result.006 file - promoters50/5676160
aaaatttataaatgt

SEQ ID NO: 200071 - DNA, 15 bp, Unknown
  misc_feature (1)..( 15): Result.006 file - promoters50/5676160
aatatttaaaaaatt

SEQ ID NO: 200072 - DNA, 15 bp, Unknown
  misc_feature (1)..( 15): Result.006 file - promoters50/5676160
actgtatataaaaaa

SEQ ID NO: 200073 - DNA, 15 bp, Unknown
  misc_feature (1)..( 15): Result.006 file - promoters50/5676513
ctagttcatgccaag

SEQ ID NO: 200074 - DNA, 12 bp, Unknown
  misc_feature (1)..( 12): Result.006 file - promoters50/5676513
attatttgtttt

SEQ ID NO: 200075 - DNA, 12 bp, Unknown
  misc_feature (1)..( 12): Result.006 file - promoters50/5676513
attattgtatac

SEQ ID NO: 200076 - DNA, 12 bp, Unknown
  misc_feature (1)..( 12): Result.006 file - promoters50/5676513
attgtttgcttt

SEQ ID NO: 200077 - DNA, 12 bp, Unknown
  misc_feature (1)..( 12): Result.006 file - promoters50/5676513
tttgttttattc

SEQ ID NO: 200078 - DNA, 12 bp, Unknown
  misc_feature (1)..( 12): Result.006 file - promoters50/5676513
tatgttctatta

SEQ ID NO: 200079 - DNA, 12 bp, Unknown
  misc_feature (1)..( 12): Result.006 file - promoters50/5676647
attgtttgcttt

SEQ ID NO: 200080 - DNA, 11 bp, Unknown
  misc_feature (1)..( 11): Result.006 file - promoters50/5676647
gaatatctttt

SEQ ID NO: 200081 - DNA, 11 bp, Unknown
  misc_feature (1)..( 11): Result.006 file - promoters50/5676647
gaatatcttta

SEQ ID NO: 200082 - DNA, 11 bp, Unknown
  misc_feature (1)..( 11): Result.006 file - promoters50/5676647
aatcttctttt

SEQ ID NO: 200083 - DNA, 12 bp, Unknown
  misc_feature (1)..( 12): Result.006 file - promoters50/5676647
agaaatctgttt

SEQ ID NO: 200084 - DNA, 12 bp, Unknown
  misc_feature (1)..( 12): Result.006 file - promoters50/5676647
tattttctttat

SEQ ID NO: 200085 - DNA, 10 bp, Unknown
  misc_feature (1)..( 10): Result.006 file - promoters50/5676647
caccaattaa

SEQ ID NO: 200086 - DNA, 10 bp, Unknown
  misc_feature (1)..( 10): Result.006 file - promoters50/5676647
aacctattac

SEQ ID NO: 200087 - DNA, 10 bp, Unknown
  misc_feature (1)..( 10): Result.006 file - promoters50/5676647
tggaaattaa

SEQ ID NO: 200088 - DNA, 10 bp, Unknown
  misc_feature (1)..( 10): Result.006 file - promoters50/5676647
aacctaattt

SEQ ID NO: 200089 - DNA, 10 bp, Unknown
  misc_feature (1)..( 10): Result.006 file - promoters50/5676647
aacttaaaag

SEQ ID NO: 200090 - DNA, 10 bp, Unknown
  misc_feature (1)..( 10): Result.006 file - promoters50/5676647
acaaaacact

SEQ ID NO: 200091 - DNA, 10 bp, Unknown
  misc_feature (1)..( 10): Result.006 file - promoters50/5676647
agaaaacaag

SEQ ID NO: 200092 - DNA, 10 bp, Unknown
  misc_feature (1)..( 10): Result.006 file - promoters50/5676647
aaaaaatact

SEQ ID NO: 200093 - DNA, 10 bp, Unknown
  misc_feature (1)..( 10): Result.006 file - promoters50/5676647
acataacatt

SEQ ID NO: 200094 - DNA, 10 bp, Unknown
  misc_feature (1)..( 10): Result.006 file - promoters50/5677230
acaaaacaaa

SEQ ID NO: 200095 - DNA, 7 bp, Unknown
  misc_feature (1)..( 7): Result.006 file - promoters50/5677230
ttttgaa

SEQ ID NO: 200096 - DNA, 7 bp, Unknown
  misc_feature (1)..( 7): Result.006 file - promoters50/5677230
tttcgaa

SEQ ID NO: 200097 - DNA, 7 bp, Unknown
  misc_feature (1)..( 7): Result.006 file - promoters50/5677230
ttttgaa

SEQ ID NO: 200098 - DNA, 11 bp, Unknown
  misc_feature (1)..( 11): Result.006 file - promoters50/5677230
aaaatatgttt

SEQ ID NO: 200099 - DNA, 11 bp, Unknown
  misc_feature (1)..( 11): Result.006 file - promoters50/5677230
gaaatatctta

SEQ ID NO: 200100 - DNA, 11 bp, Unknown
  misc_feature (1)..( 11): Result.006 file - promoters50/5677230
aaaataaaata

SEQ ID NO: 200101 - DNA, 11 bp, Unknown
  misc_feature (1)..( 11): Result.006 file - promoters50/5677230
tgaatttgttt

SEQ ID NO: 200102 - DNA, 6 bp, Unknown
  misc_feature (1)..( 6): Result.006 file - promoters50/5677230
tgtgga

SEQ ID NO: 200103 - DNA, 6 bp, Unknown
  misc_feature (1)..( 6): Result.006 file - promoters50/5677230
tgtgga

SEQ ID NO: 200104 - DNA, 6 bp, Unknown
  misc_feature (1)..( 6): Result.006 file - promoters50/5677230
tgtgga

SEQ ID NO: 200105 - DNA, 6 bp, Unknown
  misc_feature (1)..( 6): Result.006 file - promoters50/5677230
gacatt

SEQ ID NO: 200106 - DNA, 6 bp, Unknown
  misc_feature (1)..( 6): Result.006 file - promoters50/5677230
gacatt

SEQ ID NO: 200107 - DNA, 6 bp, Unknown
  misc_feature (1)..( 6): Result.006 file - promoters50/5677230
gacatt

SEQ ID NO: 200108 - DNA, 7 bp, Unknown
  misc_feature (1)..( 7): Result.006 file - promoters50/5677230
aaggaaa

SEQ ID NO: 200109 - DNA, 7 bp, Unknown
  misc_feature (1)..( 7): Result.006 file - promoters50/5677230
aagtaaa

SEQ ID NO: 200110 - DNA, 7 bp, Unknown
  misc_feature (1)..( 7): Result.006 file - promoters50/5677230
gagtaaa

SEQ ID NO: 200111 - DNA, 6 bp, Unknown
  misc_feature (1)..( 6): Result.006 file - promoters50/5677230
tttgga

SEQ ID NO: 200112 - DNA, 6 bp, Unknown
  misc_feature (1)..( 6): Result.006 file - promoters50/5677230
tttgga

SEQ ID NO: 200113 - DNA, 6 bp, Unknown
  misc_feature (1)..( 6): Result.006 file - promoters50/5677230
tttgga

SEQ ID NO: 200114 - DNA, 8 bp, Unknown
  misc_feature (1)..( 8): Result.006 file - promoters50/5677230
attcgcaa

SEQ ID NO: 200115 - DNA, 8 bp, Unknown
  misc_feature (1)..( 8): Result.006 file - promoters50/5677230
atttgcag

SEQ ID NO: 200116 - DNA, 8 bp, Unknown
  misc_feature (1)..( 8): Result.006 file - promoters50/5677230
attttcag

SEQ ID NO: 200117 - DNA, 10 bp, Unknown
  misc_feature (1)..( 10): Result.006 file - promoters50/5677230
ggaaatgaaa

SEQ ID NO: 200118 - DNA, 10 bp, Unknown
  misc_feature (1)..( 10): Result.006 file - promoters50/5677230
ggaaaagaaa

SEQ ID NO: 200119 - DNA, 10 bp, Unknown
  misc_feature (1)..( 10): Result.006 file - promoters50/5677240
ggatatgaat

SEQ ID NO: 200120 - DNA, 11 bp, Unknown
  misc_feature (1)..( 11): Result.006 file - promoters50/5677240
cctgttcttgt

SEQ ID NO: 200121 - DNA, 11 bp, Unknown
  misc_feature (1)..( 11): Result.006 file - promoters50/5677240
taagttgttgt

SEQ ID NO: 200122 - DNA, 11 bp, Unknown
  misc_feature (1)..( 11): Result.006 file - promoters50/5677240
taaattgtctt

SEQ ID NO: 200123 - DNA, 9 bp, Unknown
  misc_feature (1)..( 9): Result.006 file - promoters50/5677240
catcatctt

SEQ ID NO: 200124 - DNA, 9 bp, Unknown
  misc_feature (1)..( 9): Result.006 file - promoters50/5677240
cttcatcta

SEQ ID NO: 200125 - DNA, 9 bp, Unknown
  misc_feature (1)..( 9): Result.006 file - promoters50/5677240
cttcttcta

SEQ ID NO: 200126 - DNA, 13 bp, Unknown
  misc_feature (1)..( 13): Result.006 file - promoters50/5677240
tcgtgagttttga

SEQ ID NO: 200127 - DNA, 13 bp, Unknown
  misc_feature (1)..( 13): Result.006 file - promoters50/5677240
atatatgttttgg

SEQ ID NO: 200128 - DNA, 13 bp, Unknown
  misc_feature (1)..( 13): Result.006 file - promoters50/5677240
gagataattttgg

SEQ ID NO: 200129 - DNA, 13 bp, Unknown
  misc_feature (1)..( 13): Result.006 file - promoters50/5677240
atatatatttttt

SEQ ID NO: 200130 - DNA, 9 bp, Unknown
  misc_feature (1)..( 9): Result.006 file - promoters50/5677240
gaattgcta

SEQ ID NO: 200131 - DNA, 9 bp, Unknown
  misc_feature (1)..( 9): Result.006 file - promoters50/5677240
ttattacta

SEQ ID NO: 200132 - DNA, 9 bp, Unknown
  misc_feature (1)..( 9): Result.006 file - promoters50/5677240
ttattacaa

SEQ ID NO: 200133 - DNA, 8 bp, Unknown
  misc_feature (1)..( 8): Result.006 file - promoters50/5677240
agatatat

SEQ ID NO: 200134 - DNA, 8 bp, Unknown
  misc_feature (1)..( 8): Result.006 file - promoters50/5677240
agagataa

SEQ ID NO: 200135 - DNA, 8 bp, Unknown
  misc_feature (1)..( 8): Result.006 file - promoters50/5677240
ctatatat

SEQ ID NO: 200136 - DNA, 7 bp, Unknown
  misc_feature (1)..( 7): Result.006 file - promoters50/5677240
aaaaata

SEQ ID NO: 200137 - DNA, 7 bp, Unknown
  misc_feature (1)..( 7): Result.006 file - promoters50/5677240
aaaaatc

SEQ ID NO: 200138 - DNA, 7 bp, Unknown
  misc_feature (1)..( 7): Result.006 file - promoters50/5677274
aaacata

SEQ ID NO: 200139 - DNA, 10 bp, Unknown
  misc_feature (1)..( 10): Result.006 file - promoters50/5677274
acagttacat

SEQ ID NO: 200140 - DNA, 10 bp, Unknown
  misc_feature (1)..( 10): Result.006 file - promoters50/5677274
acatttagaa

SEQ ID NO: 200141 - DNA, 10 bp, Unknown
  misc_feature (1)..( 10): Result.006 file - promoters50/5677274
tcatatagga

SEQ ID NO: 200142 - DNA, 10 bp, Unknown
  misc_feature (1)..( 10): Result.006 file - promoters50/5677274
acatttctga

SEQ ID NO: 200143 - DNA, 10 bp, Unknown
  misc_feature (1)..( 10): Result.006 file - promoters50/5677274
ccatttctac

SEQ ID NO: 200144 - DNA, 10 bp, Unknown
  misc_feature (1)..( 10): Result.006 file - promoters50/5677274
acatatctac

SEQ ID NO: 200145 - DNA, 20 bp, Unknown
  misc_feature (1)..( 20): Result.006 file - promoters50/5677274
tatatatgacacataacttt

SEQ ID NO: 200146 - DNA, 20 bp, Unknown
  misc_feature (1)..( 20): Result.006 file - promoters50/5677274
gtaatttgaaacataaaaaa

SEQ ID NO: 200147 - DNA, 20 bp, Unknown
  misc_feature (1)..( 20): Result.006 file - promoters50/5677274
tatgtattacaaatatgaaa

SEQ ID NO: 200148 - DNA, 20 bp, Unknown
  misc_feature (1)..( 20): Result.006 file - promoters50/5677274
aacgttttcaacataatgta

SEQ ID NO: 200149 - DNA, 20 bp, Unknown
  misc_feature (1)..( 20): Result.006 file - promoters50/5677274
gcttttcttcccttatctgt

SEQ ID NO: 200150 - DNA, 20 bp, Unknown
  misc_feature (1)..( 20): Result.006 file - promoters50/5677286
taaaatatcaacaaaattaa

SEQ ID NO: 200151 - DNA, 9 bp, Unknown
  misc_feature (1)..( 9): Result.006 file - promoters50/5677286
ggagcaatg

SEQ ID NO: 200152 - DNA, 9 bp, Unknown
  misc_feature (1)..( 9): Result.006 file - promoters50/5677286
agagcaaaa

SEQ ID NO: 200153 - DNA, 9 bp, Unknown
  misc_feature (1)..( 9): Result.006 file - promoters50/5677286
ggagaaaaa

SEQ ID NO: 200154 - DNA, 9 bp, Unknown
  misc_feature (1)..( 9): Result.006 file - promoters50/5677286
ggaaaaaaa

SEQ ID NO: 200155 - DNA, 9 bp, Unknown
  misc_feature (1)..( 9): Result.006 file - promoters50/5677286
tatcatact

SEQ ID NO: 200156 - DNA, 9 bp, Unknown
  misc_feature (1)..( 9): Result.006 file - promoters50/5677286
tctcaaact

SEQ ID NO: 200157 - DNA, 10 bp, Unknown
  misc_feature (1)..( 10): Result.006 file - promoters50/5677286
tttctaaaaa

SEQ ID NO: 200158 - DNA, 10 bp, Unknown
  misc_feature (1)..( 10): Result.006 file - promoters50/5677298
tttttaacaa

SEQ ID NO: 200159 - DNA, 14 bp, Unknown
  misc_feature (1)..( 14): Result.006 file - promoters50/5677298
tcttgaattgttcc

SEQ ID NO: 200160 - DNA, 14 bp, Unknown
  misc_feature (1)..( 14): Result.006 file - promoters50/5677298
ccatgaattggcac

SEQ ID NO: 200161 - DNA, 14 bp, Unknown
  misc_feature (1)..( 14): Result.006 file - promoters50/5677298
tattgatttgttcc

SEQ ID NO: 200162 - DNA, 14 bp, Unknown
  misc_feature (1)..( 14): Result.006 file - promoters50/5677298
tatttattttagat

SEQ ID NO: 200163 - DNA, 14 bp, Unknown
  misc_feature (1)..( 14): Result.006 file - promoters50/5677298
ttgtgatttggtga

SEQ ID NO: 200164 - DNA, 14 bp, Unknown
  misc_feature (1)..( 14): Result.006 file - promoters50/5677333
tataattttgttaa

SEQ ID NO: 200165 - DNA, 11 bp, Unknown
  misc_feature (1)..( 11): Result.006 file - promoters50/5677333
gctggtgctcg

SEQ ID NO: 200166 - DNA, 11 bp, Unknown
  misc_feature (1)..( 11): Result.006 file - promoters50/5677333
tttggttctct

SEQ ID NO: 200167 - DNA, 11 bp, Unknown
  misc_feature (1)..( 11): Result.006 file - promoters50/5677333
tttgtttctct

SEQ ID NO: 200168 - DNA, 11 bp, Unknown
  misc_feature (1)..( 11): Result.006 file - promoters50/5677344
ggagtttcttg

SEQ ID NO: 200169 - DNA, 14 bp, Unknown
  misc_feature (1)..( 14): Result.006 file - promoters50/5677344
gaaaaataaactaa

SEQ ID NO: 200170 - DNA, 14 bp, Unknown
  misc_feature (1)..( 14): Result.006 file - promoters50/5677344
gacaaataaatcgt

SEQ ID NO: 200171 - DNA, 14 bp, Unknown
  misc_feature (1)..( 14): Result.006 file - promoters50/5677344
caaaaataagatta

SEQ ID NO: 200172 - DNA, 14 bp, Unknown
  misc_feature (1)..( 14): Result.006 file - promoters50/5677344
ccaaaataaaataa

SEQ ID NO: 200173 - DNA, 14 bp, Unknown
  misc_feature (1)..( 14): Result.006 file - promoters50/5677344
ccaaaattgaccct

SEQ ID NO: 200174 - DNA, 14 bp, Unknown
  misc_feature (1)..( 14): Result.006 file - promoters50/5677360
tgcaaagaaagaca

SEQ ID NO: 200175 - DNA, 8 bp, Unknown
  misc_feature (1)..( 8): Result.006 file - promoters50/5677360
gcttttat

SEQ ID NO: 200176 - DNA, 8 bp, Unknown
  misc_feature (1)..( 8): Result.006 file - promoters50/5677360
acttttaa

SEQ ID NO: 200177 - DNA, 8 bp, Unknown
  misc_feature (1)..( 8): Result.006 file - promoters50/5677360
aattttaa

SEQ ID NO: 200178 - DNA, 8 bp, Unknown
  misc_feature (1)..( 8): Result.006 file - promoters50/5677360
acttttgg

SEQ ID NO: 200179 - DNA, 8 bp, Unknown
  misc_feature (1)..( 8): Result.006 file - promoters50/5677360
aacatata

SEQ ID NO: 200180 - DNA, 8 bp, Unknown
  misc_feature (1)..( 8): Result.006 file - promoters50/5677360
tacatata

SEQ ID NO: 200181 - DNA, 8 bp, Unknown
  misc_feature (1)..( 8): Result.006 file - promoters50/5677360
aacatata

SEQ ID NO: 200182 - DNA, 9 bp, Unknown
  misc_feature (1)..( 9): Result.006 file - promoters50/5677360
catatatca

SEQ ID NO: 200183 - DNA, 9 bp, Unknown
  misc_feature (1)..( 9): Result.006 file - promoters50/5677360
aatatatca

SEQ ID NO: 200184 - DNA, 9 bp, Unknown
  misc_feature (1)..( 9): Result.006 file - promoters50/5677360
aatgtatag

SEQ ID NO: 200185 - DNA, 10 bp, Unknown
  misc_feature (1)..( 10): Result.006 file - promoters50/5677360
aaagtataaa

SEQ ID NO: 200186 - DNA, 10 bp, Unknown
  misc_feature (1)..( 10): Result.006 file - promoters50/5677360
aaaatattta

SEQ ID NO: 200187 - DNA, 10 bp, Unknown
  misc_feature (1)..( 10): Result.006 file - promoters50/5677360
caagtttaaa

SEQ ID NO: 200188 - DNA, 8 bp, Unknown
  misc_feature (1)..( 8): Result.006 file - promoters50/5677360
atatatca

SEQ ID NO: 200189 - DNA, 8 bp, Unknown
  misc_feature (1)..( 8): Result.006 file - promoters50/5677360
atacatca

SEQ ID NO: 200190 - DNA, 8 bp, Unknown
  misc_feature (1)..( 8): Result.006 file - promoters50/5677360
ctacatcc

SEQ ID NO: 200191 - DNA, 8 bp, Unknown
  misc_feature (1)..( 8): Result.006 file - promoters50/5677360
aaataaaa

SEQ ID NO: 200192 - DNA, 8 bp, Unknown
  misc_feature (1)..( 8): Result.006 file - promoters50/5677360
aaagaaaa

SEQ ID NO: 200193 - DNA, 8 bp, Unknown
  misc_feature (1)..( 8): Result.006 file - promoters50/5677360
aaagaacc

SEQ ID NO: 200194 - DNA, 11 bp, Unknown
  misc_feature (1)..( 11): Result.006 file - promoters50/5677360
caagtctaaaa

SEQ ID NO: 200195 - DNA, 11 bp, Unknown
  misc_feature (1)..( 11): Result.006 file - promoters50/5677360
agagtttaaaa

SEQ ID NO: 200196 - DNA, 11 bp, Unknown
  misc_feature (1)..( 11): Result.006 file - promoters50/5677360
agagattagta

SEQ ID NO: 200197 - DNA, 8 bp, Unknown
  misc_feature (1)..( 8): Result.006 file - promoters50/5677360
aatgtatt

SEQ ID NO: 200198 - DNA, 8 bp, Unknown
  misc_feature (1)..( 8): Result.006 file - promoters50/5677360
aatatata

SEQ ID NO: 200199 - DNA, 8 bp, Unknown
  misc_feature (1)..( 8): Result.006 file - promoters50/5677484
tataaata

SEQ ID NO: 200200 - DNA, 10 bp, Unknown
  misc_feature (1)..( 10): Result.006 file - promoters50/5677484
ttatttaaat

SEQ ID NO: 200201 - DNA, 10 bp, Unknown
  misc_feature (1)..( 10): Result.006 file - promoters50/5677484
ttctttaaaa

SEQ ID NO: 200202 - DNA, 10 bp, Unknown
  misc_feature (1)..( 10): Result.006 file - promoters50/5677484
tgtcttaaat

SEQ ID NO: 200203 - DNA, 11 bp, Unknown
  misc_feature (1)..( 11): Result.006 file - promoters50/5677484
ttctttgaaat

SEQ ID NO: 200204 - DNA, 11 bp, Unknown
  misc_feature (1)..( 11): Result.006 file - promoters50/5677484
tcatttttttc

SEQ ID NO: 200205 - DNA, 11 bp, Unknown
  misc_feature (1)..( 11): Result.006 file - promoters50/5677501
cggtttgtttg

SEQ ID NO: 200206 - DNA, 8 bp, Unknown
  misc_feature (1)..( 8): Result.006 file - promoters50/5677501
atcagaaa

SEQ ID NO: 200207 - DNA, 8 bp, Unknown
  misc_feature (1)..( 8): Result.006 file - promoters50/5677501
ttcataaa

SEQ ID NO: 200208 - DNA, 8 bp, Unknown
  misc_feature (1)..( 8): Result.006 file - promoters50/5680986
atcagatc

SEQ ID NO: 200209 - DNA, 11 bp, Unknown
  misc_feature (1)..( 11): Result.006 file - promoters50/5680986
attctagattg

SEQ ID NO: 200210 - DNA, 11 bp, Unknown
  misc_feature (1)..( 11): Result.006 file - promoters50/5680986
gttcttgataa

SEQ ID NO: 200211 - DNA, 11 bp, Unknown
  misc_feature (1)..( 11): Result.006 file - promoters50/5680986
tatctagaaga

SEQ ID NO: 200212 - DNA, 11 bp, Unknown
  misc_feature (1)..( 11): Result.006 file - promoters50/5680986
acactacatta

SEQ ID NO: 200213 - DNA, 11 bp, Unknown
  misc_feature (1)..( 11): Result.006 file - promoters50/5680986
agtccacatta

SEQ ID NO: 200214 - DNA, 11 bp, Unknown
  misc_feature (1)..( 11): Result.006 file - promoters50/5681002
gttcttcttac

SEQ ID NO: 200215 - DNA, 16 bp, Unknown
  misc_feature (1)..( 16): Result.006 file - promoters50/5681002
gaagtgttgcttatca

SEQ ID NO: 200216 - DNA, 16 bp, Unknown
  misc_feature (1)..( 16): Result.006 file - promoters50/5681002
aaaaagttgattaaat

SEQ ID NO: 200217 - DNA, 16 bp, Unknown
  misc_feature (1)..( 16): Result.006 file - promoters50/5681002
aaaaagatgatttaat

SEQ ID NO: 200218 - DNA, 10 bp, Unknown
  misc_feature (1)..( 10): Result.006 file - promoters50/5681002
tatttaaatt

SEQ ID NO: 200219 - DNA, 10 bp, Unknown
  misc_feature (1)..( 10): Result.006 file - promoters50/5681002
tatataatga

SEQ ID NO: 200220 - DNA, 10 bp, Unknown
  misc_feature (1)..( 10): Result.006 file - promoters50/5681002
tatttaaata

SEQ ID NO: 200221 - DNA, 10 bp, Unknown
  misc_feature (1)..( 10): Result.006 file - promoters50/5681002
taaacttaac

SEQ ID NO: 200222 - DNA, 10 bp, Unknown
  misc_feature (1)..( 10): Result.006 file - promoters50/5681002
taaatttatt

SEQ ID NO: 200223 - DNA, 10 bp, Unknown
  misc_feature (1)..( 10): Result.006 file - promoters50/5681002
gaaaatgaat

SEQ ID NO: 200224 - DNA, 7 bp, Unknown
  misc_feature (1)..( 7): Result.006 file - promoters50/5681002
ttattgt

SEQ ID NO: 200225 - DNA, 7 bp, Unknown
  misc_feature (1)..( 7): Result.006 file - promoters50/5681002
gtattgt

SEQ ID NO: 200226 - DNA, 7 bp, Unknown
  misc_feature (1)..( 7): Result.006 file - promoters50/5681157
gtattgg

SEQ ID NO: 200227 - DNA, 10 bp, Unknown
  misc_feature (1)..( 10): Result.006 file - promoters50/5681157
accttaaaaa

SEQ ID NO: 200228 - DNA, 10 bp, Unknown
  misc_feature (1)..( 10): Result.006 file - promoters50/5681157
accttaaaaa

SEQ ID NO: 200229 - DNA, 10 bp, Unknown
  misc_feature (1)..( 10): Result.006 file - promoters50/5681157
catttaaaat

SEQ ID NO: 200230 - DNA, 6 bp, Unknown
  misc_feature (1)..( 6): Result.006 file - promoters50/5681157
ttaaaa

SEQ ID NO: 200231 - DNA, 6 bp, Unknown
  misc_feature (1)..( 6): Result.006 file - promoters50/5681157
ttaaaa

SEQ ID NO: 200232 - DNA, 6 bp, Unknown
  misc_feature (1)..( 6): Result.006 file - promoters50/5681157
ttaaaa

SEQ ID NO: 200233 - DNA, 10 bp, Unknown
  misc_feature (1)..( 10): Result.006 file - promoters50/5681157
ggaaattaaa

SEQ ID NO: 200234 - DNA, 10 bp, Unknown
  misc_feature (1)..( 10): Result.006 file - promoters50/5681157
acaaaataaa

SEQ ID NO: 200235 - DNA, 10 bp, Unknown
  misc_feature (1)..( 10): Result.006 file - promoters50/5681157
ttaaaatagt

SEQ ID NO: 200236 - DNA, 11 bp, Unknown
  misc_feature (1)..( 11): Result.006 file - promoters50/5681157
ataaacctaaa

SEQ ID NO: 200237 - DNA, 11 bp, Unknown
  misc_feature (1)..( 11): Result.006 file - promoters50/5681157
ataaaccaaaa

SEQ ID NO: 200238 - DNA, 11 bp, Unknown
  misc_feature (1)..( 11): Result.006 file - promoters50/5681157
ttaaaccattc

SEQ ID NO: 200239 - DNA, 9 bp, Unknown
  misc_feature (1)..( 9): Result.006 file - promoters50/5681157
aaaataaac

SEQ ID NO: 200240 - DNA, 9 bp, Unknown
  misc_feature (1)..( 9): Result.006 file - promoters50/5681157
aaaatatga

SEQ ID NO: 200241 - DNA, 9 bp, Unknown
  misc_feature (1)..( 9): Result.006 file - promoters50/5681157
aaattaaac

SEQ ID NO: 200242 - DNA, 10 bp, Unknown
  misc_feature (1)..( 10): Result.006 file - promoters50/5681157
tttgtaatat

SEQ ID NO: 200243 - DNA, 10 bp, Unknown
  misc_feature (1)..( 10): Result.006 file - promoters50/5681157
aatgtattat

SEQ ID NO: 200244 - DNA, 10 bp, Unknown
  misc_feature (1)..( 10): Result.006 file - promoters50/5681157
tttttaaaaa

SEQ ID NO: 200245 - DNA, 9 bp, Unknown
  misc_feature (1)..( 9): Result.006 file - promoters50/5681157
atttaaaaa

SEQ ID NO: 200246 - DNA, 9 bp, Unknown
  misc_feature (1)..( 9): Result.006 file - promoters50/5681157
attcaaaaa

SEQ ID NO: 200247 - DNA, 9 bp, Unknown
  misc_feature (1)..( 9): Result.006 file - promoters50/5681157
atttaaaaa

SEQ ID NO: 200248 - DNA, 10 bp, Unknown
  misc_feature (1)..( 10): Result.006 file - promoters50/5681157
attaccaatt

SEQ ID NO: 200249 - DNA, 10 bp, Unknown
  misc_feature (1)..( 10): Result.006 file - promoters50/5681157
attagcaatg

SEQ ID NO: 200250 - DNA, 10 bp, Unknown
  misc_feature (1)..( 10): Result.006 file - promoters50/5753942
cctagctatg

SEQ ID NO: 200251 - DNA, 8 bp, Unknown
  misc_feature (1)..( 8): Result.006 file - promoters50/5753942
caatcaaa

SEQ ID NO: 200252 - DNA, 8 bp, Unknown
  misc_feature (1)..( 8): Result.006 file - promoters50/5753942
caaacaaa

SEQ ID NO: 200253 - DNA, 8 bp, Unknown
  misc_feature (1)..( 8): Result.006 file - promoters50/5753942
taattaaa

SEQ ID NO: 200254 - DNA, 8 bp, Unknown
  misc_feature (1)..( 8): Result.006 file - promoters50/5753942
caaccaac

SEQ ID NO: 200255 - DNA, 8 bp, Unknown
  misc_feature (1)..( 8): Result.006 file - promoters50/5753942
caatcagt

SEQ ID NO: 200256 - DNA, 8 bp, Unknown
  misc_feature (1)..( 8): Result.006 file - promoters50/5753942
gaaacaaa

SEQ ID NO: 200257 - DNA, 12 bp, Unknown
  misc_feature (1)..( 12): Result.006 file - promoters50/5753942
tttttgtttctc

SEQ ID NO: 200258 - DNA, 12 bp, Unknown
  misc_feature (1)..( 12): Result.006 file - promoters50/5753942
atttagttttat

SEQ ID NO: 200259 - DNA, 12 bp, Unknown
  misc_feature (1)..( 12): Result.006 file - promoters50/5753942
cttttttttttt

SEQ ID NO: 200260 - DNA, 12 bp, Unknown
  misc_feature (1)..( 12): Result.006 file - promoters50/5753942
tttttgttgttg

SEQ ID NO: 200261 - DNA, 12 bp, Unknown
  misc_feature (1)..( 12): Result.006 file - promoters50/5753942
attaagtgtcaa

SEQ ID NO: 200262 - DNA, 12 bp, Unknown
  misc_feature (1)..( 12): Result.006 file - promoters50/5753942
attttgtgaagt

SEQ ID NO: 200263 - DNA, 10 bp, Unknown
  misc_feature (1)..( 10): Result.006 file - promoters50/5753942
attaataaat

SEQ ID NO: 200264 - DNA, 10 bp, Unknown
  misc_feature (1)..( 10): Result.006 file - promoters50/5753942
gaaaataaac

SEQ ID NO: 200265 - DNA, 10 bp, Unknown
  misc_feature (1)..( 10): Result.006 file - promoters50/5753942
aataataact

SEQ ID NO: 200266 - DNA, 10 bp, Unknown
  misc_feature (1)..( 10): Result.006 file - promoters50/5753942
attaatgaat

SEQ ID NO: 200267 - DNA, 10 bp, Unknown
  misc_feature (1)..( 10): Result.006 file - promoters50/5753942
attaattaat

SEQ ID NO: 200268 - DNA, 10 bp, Unknown
  misc_feature (1)..( 10): Result.006 file - promoters50/5753942
taaaacaaaa

SEQ ID NO: 200269 - DNA, 9 bp, Unknown
  misc_feature (1)..( 9): Result.006 file - promoters50/5753942
acaattgta

SEQ ID NO: 200270 - DNA, 9 bp, Unknown
  misc_feature (1)..( 9): Result.006 file - promoters50/5753942
tacattgta

SEQ ID NO: 200271 - DNA, 9 bp, Unknown
  misc_feature (1)..( 9): Result.006 file - promoters50/5753942
caaattgta

SEQ ID NO: 200272 - DNA, 9 bp, Unknown
  misc_feature (1)..( 9): Result.006 file - promoters50/5753942
taccttgtt

SEQ ID NO: 200273 - DNA, 9 bp, Unknown
  misc_feature (1)..( 9): Result.006 file - promoters50/5753942
tccattgtt

SEQ ID NO: 200274 - DNA, 9 bp, Unknown
  misc_feature (1)..( 9): Result.006 file - promoters50/5753942
tcacttgtt

SEQ ID NO: 200275 - DNA, 11 bp, Unknown
  misc_feature (1)..( 11): Result.006 file - promoters50/5753942
gaatttggtgg

SEQ ID NO: 200276 - DNA, 11 bp, Unknown
  misc_feature (1)..( 11): Result.006 file - promoters50/5753942
gaatttaagaa

SEQ ID NO: 200277 - DNA, 11 bp, Unknown
  misc_feature (1)..( 11): Result.006 file - promoters50/5753942
taatttgggct

SEQ ID NO: 200278 - DNA, 11 bp, Unknown
  misc_feature (1)..( 11): Result.006 file - promoters50/5753942
tattttaggcc

SEQ ID NO: 200279 - DNA, 11 bp, Unknown
  misc_feature (1)..( 11): Result.006 file - promoters50/5753942
gtatttgggcc

SEQ ID NO: 200280 - DNA, 11 bp, Unknown
  misc_feature (1)..( 11): Result.006 file - promoters50/5754265
atatttggatt

SEQ ID NO: 200281 - DNA, 12 bp, Unknown
  misc_feature (1)..( 12): Result.006 file - promoters50/5754265
cgatcttgtata

SEQ ID NO: 200282 - DNA, 12 bp, Unknown
  misc_feature (1)..( 12): Result.006 file - promoters50/5754265
tgattttggttt

SEQ ID NO: 200283 - DNA, 12 bp, Unknown
  misc_feature (1)..( 12): Result.006 file - promoters50/5754265
tgatttttctat

SEQ ID NO: 200284 - DNA, 12 bp, Unknown
  misc_feature (1)..( 12): Result.006 file - promoters50/5754265
cacttttgtttt

SEQ ID NO: 200285 - DNA, 12 bp, Unknown
  misc_feature (1)..( 12): Result.006 file - promoters50/5754265
ctctattgtttt

SEQ ID NO: 200286 - DNA, 12 bp, Unknown
  misc_feature (1)..( 12): Result.006 file - promoters50/5754269
aatgtttgttta

SEQ ID NO: 200287 - DNA, 12 bp, Unknown
  misc_feature (1)..( 12): Result.006 file - promoters50/5754269
gattattgttca

SEQ ID NO: 200288 - DNA, 12 bp, Unknown
  misc_feature (1)..( 12): Result.006 file - promoters50/5754269
gattatggacta

SEQ ID NO: 200289 - DNA, 12 bp, Unknown
  misc_feature (1)..( 12): Result.006 file - promoters50/5754269
tattttggaatt

SEQ ID NO: 200290 - DNA, 13 bp, Unknown
  misc_feature (1)..( 13): Result.006 file - promoters50/5754269
aatcttttaaaaa

SEQ ID NO: 200291 - DNA, 13 bp, Unknown
  misc_feature (1)..( 13): Result.006 file - promoters50/5754269
tatatattgcaat

SEQ ID NO: 200292 - DNA, 13 bp, Unknown
  misc_feature (1)..( 13): Result.006 file - promoters50/5754273
cgatggttgcaaa

SEQ ID NO: 200293 - DNA, 10 bp, Unknown
  misc_feature (1)..( 10): Result.006 file - promoters50/5754273
aaataaatta

SEQ ID NO: 200294 - DNA, 10 bp, Unknown
  misc_feature (1)..( 10): Result.006 file - promoters50/5754273
aaacaaattt

SEQ ID NO: 200295 - DNA, 10 bp, Unknown
  misc_feature (1)..( 10): Result.006 file - promoters50/5754273
ttcaaaatta

SEQ ID NO: 200296 - DNA, 10 bp, Unknown
  misc_feature (1)..( 10): Result.006 file - promoters50/5754273
aaaaaaattg

SEQ ID NO: 200297 - DNA, 10 bp, Unknown
  misc_feature (1)..( 10): Result.006 file - promoters50/5754273
gaaaaaatag

SEQ ID NO: 200298 - DNA, 10 bp, Unknown
  misc_feature (1)..( 10): Result.006 file - promoters50/5754276
taaaaaacac

SEQ ID NO: 200299 - DNA, 8 bp, Unknown
  misc_feature (1)..( 8): Result.006 file - promoters50/5754276
aaatcgat

SEQ ID NO: 200300 - DNA, 8 bp, Unknown
  misc_feature (1)..( 8): Result.006 file - promoters50/5754276
aaatcgta

SEQ ID NO: 200301 - DNA, 8 bp, Unknown
  misc_feature (1)..( 8): Result.006 file - promoters50/5754276
caattgat

SEQ ID NO: 200302 - DNA, 9 bp, Unknown
  misc_feature (1)..( 9): Result.006 file - promoters50/5754276
tctgtttgt

SEQ ID NO: 200303 - DNA, 9 bp, Unknown
  misc_feature (1)..( 9): Result.006 file - promoters50/5754276
tctatttgt

SEQ ID NO: 200304 - DNA, 9 bp, Unknown
  misc_feature (1)..( 9): Result.006 file - promoters50/5754280
tttatttga

SEQ ID NO: 200305 - DNA, 13 bp, Unknown
  misc_feature (1)..( 13): Result.006 file - promoters50/5754280
ccaaaagaaacga

SEQ ID NO: 200306 - DNA, 13 bp, Unknown
  misc_feature (1)..( 13): Result.006 file - promoters50/5754280
agaaatgaaatca

SEQ ID NO: 200307 - DNA, 13 bp, Unknown
  misc_feature (1)..( 13): Result.006 file - promoters50/5754280
acaatagagattg

SEQ ID NO: 200308 - DNA, 13 bp, Unknown
  misc_feature (1)..( 13): Result.006 file - promoters50/5754280
ccaaaagtttata

SEQ ID NO: 200309 - DNA, 13 bp, Unknown
  misc_feature (1)..( 13): Result.006 file - promoters50/5754280
agcttagatatga

SEQ ID NO: 200310 - DNA, 13 bp, Unknown
  misc_feature (1)..( 13): Result.006 file - promoters50/5754288
gtgtatgatcaca

SEQ ID NO: 200311 - DNA, 8 bp, Unknown
  misc_feature (1)..( 8): Result.006 file - promoters50/5754288
tacaaaaa

SEQ ID NO: 200312 - DNA, 8 bp, Unknown
  misc_feature (1)..( 8): Result.006 file - promoters50/5754288
tacaaaaa

SEQ ID NO: 200313 - DNA, 8 bp, Unknown
  misc_feature (1)..( 8): Result.006 file - promoters50/5754288
cacaaaat

SEQ ID NO: 200314 - DNA, 10 bp, Unknown
  misc_feature (1)..( 10): Result.006 file - promoters50/5754288
ttattatata

SEQ ID NO: 200315 - DNA, 10 bp, Unknown
  misc_feature (1)..( 10): Result.006 file - promoters50/5754288
ttaatatttt

SEQ ID NO: 200316 - DNA, 10 bp, Unknown
  misc_feature (1)..( 10): Result.006 file - promoters50/5754288
ttattttata

SEQ ID NO: 200317 - DNA, 11 bp, Unknown
  misc_feature (1)..( 11): Result.006 file - promoters50/5754288
ttgaatgtttc

SEQ ID NO: 200318 - DNA, 11 bp, Unknown
  misc_feature (1)..( 11): Result.006 file - promoters50/5754288
ttgaatatttc

SEQ ID NO: 200319 - DNA, 11 bp, Unknown
  misc_feature (1)..( 11): Result.006 file - promoters50/5754419
ttggatagttt

SEQ ID NO: 200320 - DNA, 14 bp, Unknown
  misc_feature (1)..( 14): Result.006 file - promoters50/5754419
atacaatgatattg

SEQ ID NO: 200321 - DNA, 14 bp, Unknown
  misc_feature (1)..( 14): Result.006 file - promoters50/5754419
aaataattatacag

SEQ ID NO: 200322 - DNA, 14 bp, Unknown
  misc_feature (1)..( 14): Result.006 file - promoters50/5754419
tctcagtgattttg

SEQ ID NO: 200323 - DNA, 14 bp, Unknown
  misc_feature (1)..( 14): Result.006 file - promoters50/5754419
ataaaatgttatgc

SEQ ID NO: 200324 - DNA, 14 bp, Unknown
  misc_feature (1)..( 14): Result.006 file - promoters50/5754419
ttgtaataataact

SEQ ID NO: 200325 - DNA, 14 bp, Unknown
  misc_feature (1)..( 14): Result.006 file - promoters50/5754419
cgttattaataaat

SEQ ID NO: 200326 - DNA, 14 bp, Unknown
  misc_feature (1)..( 14): Result.006 file - promoters50/5754419
ctaaattaaaattt

SEQ ID NO: 200327 - DNA, 15 bp, Unknown
  misc_feature (1)..( 15): Result.006 file - promoters50/5754419
atcgagagaagatgt

SEQ ID NO: 200328 - DNA, 15 bp, Unknown
  misc_feature (1)..( 15): Result.006 file - promoters50/5754419
tattagagaaattta

SEQ ID NO: 200329 - DNA, 15 bp, Unknown
  misc_feature (1)..( 15): Result.006 file - promoters50/5754419
tattacagaaaaatc

SEQ ID NO: 200330 - DNA, 15 bp, Unknown
  misc_feature (1)..( 15): Result.006 file - promoters50/5754419
cggaagaaaaattac

SEQ ID NO: 200331 - DNA, 15 bp, Unknown
  misc_feature (1)..( 15): Result.006 file - promoters50/5754419
caacatagaaagtta

SEQ ID NO: 200332 - DNA, 15 bp, Unknown
  misc_feature (1)..( 15): Result.006 file - promoters50/5754419
agtaactaaaattag

SEQ ID NO: 200333 - DNA, 10 bp, Unknown
  misc_feature (1)..( 10): Result.006 file - promoters50/5754419
tttataatat

SEQ ID NO: 200334 - DNA, 10 bp, Unknown
  misc_feature (1)..( 10): Result.006 file - promoters50/5754419
gttataaagg

SEQ ID NO: 200335 - DNA, 11 bp, Unknown
  misc_feature (1)..( 11): Result.006 file - promoters50/5754419
attaataatac

SEQ ID NO: 200336 - DNA, 11 bp, Unknown
  misc_feature (1)..( 11): Result.006 file - promoters50/5754419
tttaaaaactt

SEQ ID NO: 200337 - DNA, 11 bp, Unknown
  misc_feature (1)..( 11): Result.006 file - promoters50/5754419
aaaaatactta

SEQ ID NO: 200338 - DNA, 11 bp, Unknown
  misc_feature (1)..( 11): Result.006 file - promoters50/5754419
tacaataatac

SEQ ID NO: 200339 - DNA, 8 bp, Unknown
  misc_feature (1)..( 8): Result.006 file - promoters50/5754419
taatatat

SEQ ID NO: 200340 - DNA, 8 bp, Unknown
  misc_feature (1)..( 8): Result.006 file - promoters50/5754419
taagatat

SEQ ID NO: 200341 - DNA, 8 bp, Unknown
  misc_feature (1)..( 8): Result.006 file - promoters50/5754419
taatatgg

SEQ ID NO: 200342 - DNA, 8 bp, Unknown
  misc_feature (1)..( 8): Result.006 file - promoters50/5754419
caatatat

SEQ ID NO: 200343 - DNA, 8 bp, Unknown
  misc_feature (1)..( 8): Result.006 file - promoters50/5754419
aaatatag

SEQ ID NO: 200344 - DNA, 8 bp, Unknown
  misc_feature (1)..( 8): Result.006 file - promoters50/5754423
ggagatat

SEQ ID NO: 200345 - DNA, 14 bp, Unknown
  misc_feature (1)..( 14): Result.006 file - promoters50/5754423
ttatgttcctaatt

SEQ ID NO: 200346 - DNA, 14 bp, Unknown
  misc_feature (1)..( 14): Result.006 file - promoters50/5754423
ttatcttccatata

SEQ ID NO: 200347 - DNA, 14 bp, Unknown
  misc_feature (1)..( 14): Result.006 file - promoters50/5754461
cgctctaccaaata

SEQ ID NO: 200348 - DNA, 11 bp, Unknown
  misc_feature (1)..( 11): Result.006 file - promoters50/5754461
attaaatttta

SEQ ID NO: 200349 - DNA, 11 bp, Unknown
  misc_feature (1)..( 11): Result.006 file - promoters50/5754461
tataaattaaa

SEQ ID NO: 200350 - DNA, 11 bp, Unknown
  misc_feature (1)..( 11): Result.006 file - promoters50/5754461
aataaaataaa

SEQ ID NO: 200351 - DNA, 11 bp, Unknown
  misc_feature (1)..( 11): Result.006 file - promoters50/5754461
aaaaaactaat

SEQ ID NO: 200352 - DNA, 11 bp, Unknown
  misc_feature (1)..( 11): Result.006 file - promoters50/5754461
tatgaattatg

SEQ ID NO: 200353 - DNA, 12 bp, Unknown
  misc_feature (1)..( 12): Result.006 file - promoters50/5754461
gaaaaagctaat

SEQ ID NO: 200354 - DNA, 12 bp, Unknown
  misc_feature (1)..( 12): Result.006 file - promoters50/5754461
gcccaaaataat

SEQ ID NO: 200355 - DNA, 10 bp, Unknown
  misc_feature (1)..( 10): Result.006 file - promoters50/5754461
cataacaatt

SEQ ID NO: 200356 - DNA, 10 bp, Unknown
  misc_feature (1)..( 10): Result.006 file - promoters50/5754461
catcacaatt

SEQ ID NO: 200357 - DNA, 10 bp, Unknown
  misc_feature (1)..( 10): Result.006 file - promoters50/5754461
agtaataatg

SEQ ID NO: 200358 - DNA, 10 bp, Unknown
  misc_feature (1)..( 10): Result.006 file - promoters50/5754461
gtcaatgatg

SEQ ID NO: 200359 - DNA, 10 bp, Unknown
  misc_feature (1)..( 10): Result.006 file - promoters50/5754461
cataataacc

SEQ ID NO: 200360 - DNA, 10 bp, Unknown
  misc_feature (1)..( 10): Result.006 file - promoters50/5754461
gctaataacg

SEQ ID NO: 200361 - DNA, 13 bp, Unknown
  misc_feature (1)..( 13): Result.006 file - promoters50/5754461
aaaaaatttatat

SEQ ID NO: 200362 - DNA, 13 bp, Unknown
  misc_feature (1)..( 13): Result.006 file - promoters50/5754461
caaaaatgtatat

SEQ ID NO: 200363 - DNA, 13 bp, Unknown
  misc_feature (1)..( 13): Result.006 file - promoters50/5754461
caataatttgttt

SEQ ID NO: 200364 - DNA, 13 bp, Unknown
  misc_feature (1)..( 13): Result.006 file - promoters50/5754461
gatgaatgtactg

SEQ ID NO: 200365 - DNA, 13 bp, Unknown
  misc_feature (1)..( 13): Result.006 file - promoters50/5754461
tgctaatgtttat

SEQ ID NO: 200366 - DNA, 13 bp, Unknown
  misc_feature (1)..( 13): Result.006 file - promoters50/5755107
ttttaatttatca

SEQ ID NO: 200367 - DNA, 7 bp, Unknown
  misc_feature (1)..( 7): Result.006 file - promoters50/5755107
tgttttg

SEQ ID NO: 200368 - DNA, 7 bp, Unknown
  misc_feature (1)..( 7): Result.006 file - promoters50/5755107
ggttttg

SEQ ID NO: 200369 - DNA, 7 bp, Unknown
  misc_feature (1)..( 7): Result.006 file - promoters50/5755107
ggtttta

SEQ ID NO: 200370 - DNA, 7 bp, Unknown
  misc_feature (1)..( 7): Result.006 file - promoters50/5755107
gtgttta

SEQ ID NO: 200371 - DNA, 7 bp, Unknown
  misc_feature (1)..( 7): Result.006 file - promoters50/5755107
gtgtttc

SEQ ID NO: 200372 - DNA, 7 bp, Unknown
  misc_feature (1)..( 7): Result.006 file - promoters50/5755107
atgtttc

SEQ ID NO: 200373 - DNA, 11 bp, Unknown
  misc_feature (1)..( 11): Result.006 file - promoters50/5755107
ggaatgaagat

SEQ ID NO: 200374 - DNA, 11 bp, Unknown
  misc_feature (1)..( 11): Result.006 file - promoters50/5755107
acaattaagcc

SEQ ID NO: 200375 - DNA, 11 bp, Unknown
  misc_feature (1)..( 11): Result.006 file - promoters50/5755107
acaattcagcc

SEQ ID NO: 200376 - DNA, 6 bp, Unknown
  misc_feature (1)..( 6): Result.006 file - promoters50/5755107
attgga

SEQ ID NO: 200377 - DNA, 6 bp, Unknown
  misc_feature (1)..( 6): Result.006 file - promoters50/5755107
attgga

SEQ ID NO: 200378 - DNA, 6 bp, Unknown
  misc_feature (1)..( 6): Result.006 file - promoters50/5755107
attgga

SEQ ID NO: 200379 - DNA, 7 bp, Unknown
  misc_feature (1)..( 7): Result.006 file - promoters50/5755107
aaagaat

SEQ ID NO: 200380 - DNA, 7 bp, Unknown
  misc_feature (1)..( 7): Result.006 file - promoters50/5755107
aaacaat

SEQ ID NO: 200381 - DNA, 7 bp, Unknown
  misc_feature (1)..( 7): Result.006 file - promoters50/5755107
aaataat

SEQ ID NO: 200382 - DNA, 7 bp, Unknown
  misc_feature (1)..( 7): Result.006 file - promoters50/5755107
tttcatt

SEQ ID NO: 200383 - DNA, 7 bp, Unknown
  misc_feature (1)..( 7): Result.006 file - promoters50/5755107
tttcata

SEQ ID NO: 200384 - DNA, 7 bp, Unknown
  misc_feature (1)..( 7): Result.006 file - promoters50/5755846
tttgata

SEQ ID NO: 200385 - DNA, 15 bp, Unknown
  misc_feature (1)..( 15): Result.006 file - promoters50/5755846
ctctgaaacatatga

SEQ ID NO: 200386 - DNA, 15 bp, Unknown
  misc_feature (1)..( 15): Result.006 file - promoters50/5755846
ctctaaaacaaaata

SEQ ID NO: 200387 - DNA, 15 bp, Unknown
  misc_feature (1)..( 15): Result.006 file - promoters50/5755846
ttcttaaagaataat

SEQ ID NO: 200388 - DNA, 15 bp, Unknown
  misc_feature (1)..( 15): Result.006 file - promoters50/5755846
tgtccaaacaaagtc

SEQ ID NO: 200389 - DNA, 15 bp, Unknown
  misc_feature (1)..( 15): Result.006 file - promoters50/5755846
aacacaaactaagtc

SEQ ID NO: 200390 - DNA, 11 bp, Unknown
  misc_feature (1)..( 11): Result.006 file - promoters50/5755846
attgtatgatt

SEQ ID NO: 200391 - DNA, 11 bp, Unknown
  misc_feature (1)..( 11): Result.006 file - promoters50/5755846
attttatcaat

SEQ ID NO: 200392 - DNA, 11 bp, Unknown
  misc_feature (1)..( 11): Result.006 file - promoters50/5755846
atttgatctct

SEQ ID NO: 200393 - DNA, 11 bp, Unknown
  misc_feature (1)..( 11): Result.006 file - promoters50/5755846
ctttgatcaaa

SEQ ID NO: 200394 - DNA, 11 bp, Unknown
  misc_feature (1)..( 11): Result.006 file - promoters50/5756166
aaatgagctct

SEQ ID NO: 200395 - DNA, 10 bp, Unknown
  misc_feature (1)..( 10): Result.006 file - promoters50/5756166
acctcttaat

SEQ ID NO: 200396 - DNA, 10 bp, Unknown
  misc_feature (1)..( 10): Result.006 file - promoters50/5756166
tcttcttaaa

SEQ ID NO: 200397 - DNA, 10 bp, Unknown
  misc_feature (1)..( 10): Result.006 file - promoters50/5756166
ctctctaaaa

SEQ ID NO: 200398 - DNA, 10 bp, Unknown
  misc_feature (1)..( 10): Result.006 file - promoters50/5756166
tcttgttaat

SEQ ID NO: 200399 - DNA, 10 bp, Unknown
  misc_feature (1)..( 10): Result.006 file - promoters50/5756166
gtttcttatg

SEQ ID NO: 200400 - DNA, 10 bp, Unknown
  misc_feature (1)..( 10): Result.006 file - promoters50/5756166
tttttttatt

SEQ ID NO: 200401 - DNA, 10 bp, Unknown
  misc_feature (1)..( 10): Result.006 file - promoters50/5756166
atatgtcaat

SEQ ID NO: 200402 - DNA, 11 bp, Unknown
  misc_feature (1)..( 11): Result.006 file - promoters50/5756166
attatttcaca

SEQ ID NO: 200403 - DNA, 11 bp, Unknown
  misc_feature (1)..( 11): Result.006 file - promoters50/5756166
tttatttcctc

SEQ ID NO: 200404 - DNA, 11 bp, Unknown
  misc_feature (1)..( 11): Result.006 file - promoters50/5756166
taaatttcaca

SEQ ID NO: 200405 - DNA, 11 bp, Unknown
  misc_feature (1)..( 11): Result.006 file - promoters50/5756166
tatatgtcaat

SEQ ID NO: 200406 - DNA, 11 bp, Unknown
  misc_feature (1)..( 11): Result.006 file - promoters50/5756166
tttgtttttgg

SEQ ID NO: 200407 - DNA, 11 bp, Unknown
  misc_feature (1)..( 11): Result.006 file - promoters50/5756489
cttgttaatat

SEQ ID NO: 200408 - DNA, 8 bp, Unknown
  misc_feature (1)..( 8): Result.006 file - promoters50/5756489
aaaatctc

SEQ ID NO: 200409 - DNA, 8 bp, Unknown
  misc_feature (1)..( 8): Result.006 file - promoters50/5756489
aaactcta

SEQ ID NO: 200410 - DNA, 8 bp, Unknown
  misc_feature (1)..( 8): Result.006 file - promoters50/5756489
aaaataat

SEQ ID NO: 200411 - DNA, 15 bp, Unknown
  misc_feature (1)..( 15): Result.006 file - promoters50/5756489
caaagtgaattattc

SEQ ID NO: 200412 - DNA, 15 bp, Unknown
  misc_feature (1)..( 15): Result.006 file - promoters50/5756489
taatatcttttattc

SEQ ID NO: 200413 - DNA, 15 bp, Unknown
  misc_feature (1)..( 15): Result.006 file - promoters50/5756489
caaaatgaaatattt

SEQ ID NO: 200414 - DNA, 9 bp, Unknown
  misc_feature (1)..( 9): Result.006 file - promoters50/5756489
actaatttt

SEQ ID NO: 200415 - DNA, 9 bp, Unknown
  misc_feature (1)..( 9): Result.006 file - promoters50/5756489
actaataaa

SEQ ID NO: 200416 - DNA, 9 bp, Unknown
  misc_feature (1)..( 9): Result.006 file - promoters50/5756489
tctaacaaa

SEQ ID NO: 200417 - DNA, 8 bp, Unknown
  misc_feature (1)..( 8): Result.006 file - promoters50/5756489
taatttac

SEQ ID NO: 200418 - DNA, 8 bp, Unknown
  misc_feature (1)..( 8): Result.006 file - promoters50/5756489
agatttac

SEQ ID NO: 200419 - DNA, 8 bp, Unknown
  misc_feature (1)..( 8): Result.006 file - promoters50/5756489
taatttat

SEQ ID NO: 200420 - DNA, 10 bp, Unknown
  misc_feature (1)..( 10): Result.006 file - promoters50/5756489
taataattta

SEQ ID NO: 200421 - DNA, 10 bp, Unknown
  misc_feature (1)..( 10): Result.006 file - promoters50/5756489
aaataataaa

SEQ ID NO: 200422 - DNA, 10 bp, Unknown
  misc_feature (1)..( 10): Result.006 file - promoters50/5756489
aaatactaaa

SEQ ID NO: 200423 - DNA, 9 bp, Unknown
  misc_feature (1)..( 9): Result.006 file - promoters50/5756489
atatattta

SEQ ID NO: 200424 - DNA, 9 bp, Unknown
  misc_feature (1)..( 9): Result.006 file - promoters50/5756489
atatattct

SEQ ID NO: 200425 - DNA, 9 bp, Unknown
  misc_feature (1)..( 9): Result.006 file - promoters50/5756489
ctatactct

SEQ ID NO: 200426 - DNA, 8 bp, Unknown
  misc_feature (1)..( 8): Result.006 file - promoters50/5756489
aaatattc

SEQ ID NO: 200427 - DNA, 8 bp, Unknown
  misc_feature (1)..( 8): Result.006 file - promoters50/5756489
taatatta

SEQ ID NO: 200428 - DNA, 8 bp, Unknown
  misc_feature (1)..( 8): Result.006 file - promoters50/5756489
taatatct

SEQ ID NO: 200429 - DNA, 8 bp, Unknown
  misc_feature (1)..( 8): Result.006 file - promoters50/5756489
taatttta

SEQ ID NO: 200430 - DNA, 8 bp, Unknown
  misc_feature (1)..( 8): Result.006 file - promoters50/5756489
gtaacaaa

SEQ ID NO: 200431 - DNA, 8 bp, Unknown
  misc_feature (1)..( 8): Result.006 file - promoters50/5756489
ctaacaaa

SEQ ID NO: 200432 - DNA, 8 bp, Unknown
  misc_feature (1)..( 8): Result.006 file - promoters50/5758021
ctaataaa

SEQ ID NO: 200433 - DNA, 9 bp, Unknown
  misc_feature (1)..( 9): Result.006 file - promoters50/5758021
ttaacgatg

SEQ ID NO: 200434 - DNA, 9 bp, Unknown
  misc_feature (1)..( 9): Result.006 file - promoters50/5758021
ttatcgatt

SEQ ID NO: 200435 - DNA, 9 bp, Unknown
  misc_feature (1)..( 9): Result.006 file - promoters50/5758021
taaacgata

SEQ ID NO: 200436 - DNA, 9 bp, Unknown
  misc_feature (1)..( 9): Result.006 file - promoters50/5758021
aaaaagatg

SEQ ID NO: 200437 - DNA, 9 bp, Unknown
  misc_feature (1)..( 9): Result.006 file - promoters50/5758021
atatctatt

SEQ ID NO: 200438 - DNA, 9 bp, Unknown
  misc_feature (1)..( 9): Result.006 file - promoters50/5759305
acaactata

SEQ ID NO: 200439 - DNA, 12 bp, Unknown
  misc_feature (1)..( 12): Result.006 file - promoters50/5759305
taaggcaaattt

SEQ ID NO: 200440 - DNA, 12 bp, Unknown
  misc_feature (1)..( 12): Result.006 file - promoters50/5759305
taagccaaacgc

SEQ ID NO: 200441 - DNA, 12 bp, Unknown
  misc_feature (1)..( 12): Result.006 file - promoters50/5759305
ttttgcaatttt

SEQ ID NO: 200442 - DNA, 9 bp, Unknown
  misc_feature (1)..( 9): Result.006 file - promoters50/5759305
caaatttag

SEQ ID NO: 200443 - DNA, 9 bp, Unknown
  misc_feature (1)..( 9): Result.006 file - promoters50/5759305
gcaatctag

SEQ ID NO: 200444 - DNA, 9 bp, Unknown
  misc_feature (1)..( 9): Result.006 file - promoters50/5773091
gcaattttt

SEQ ID NO: 200445 - DNA, 15 bp, Unknown
  misc_feature (1)..( 15): Result.006 file - promoters50/5773091
aggactcagaccagt

SEQ ID NO: 200446 - DNA, 15 bp, Unknown
  misc_feature (1)..( 15): Result.006 file - promoters50/5773091
catcttcagacaaat

SEQ ID NO: 200447 - DNA, 15 bp, Unknown
  misc_feature (1)..( 15): Result.006 file - promoters50/5773091
cgtcctccgacgtgt

SEQ ID NO: 200448 - DNA, 15 bp, Unknown
  misc_feature (1)..( 15): Result.006 file - promoters50/5773091
tagattcagattcgg

SEQ ID NO: 200449 - DNA, 15 bp, Unknown
  misc_feature (1)..( 15): Result.006 file - promoters50/5773091
tagattcatattctt

SEQ ID NO: 200450 - DNA, 15 bp, Unknown
  misc_feature (1)..( 15): Result.006 file - promoters50/5773091
tggtgccattttctt

SEQ ID NO: 200451 - DNA, 11 bp, Unknown
  misc_feature (1)..( 11): Result.006 file - promoters50/5773091
tgacttggagc

SEQ ID NO: 200452 - DNA, 11 bp, Unknown
  misc_feature (1)..( 11): Result.006 file - promoters50/5773091
tgatttgattt

SEQ ID NO: 200453 - DNA, 11 bp, Unknown
  misc_feature (1)..( 11): Result.006 file - promoters50/5773091
tgacgtggaat

SEQ ID NO: 200454 - DNA, 11 bp, Unknown
  misc_feature (1)..( 11): Result.006 file - promoters50/5773091
ctattttatta

SEQ ID NO: 200455 - DNA, 11 bp, Unknown
  misc_feature (1)..( 11): Result.006 file - promoters50/5773091
caaatttatta

SEQ ID NO: 200456 - DNA, 11 bp, Unknown
  misc_feature (1)..( 11): Result.006 file - promoters50/5773091
gaaatttttta

SEQ ID NO: 200457 - DNA, 10 bp, Unknown
  misc_feature (1)..( 10): Result.006 file - promoters50/5773091
tgagtttttt

SEQ ID NO: 200458 - DNA, 10 bp, Unknown
  misc_feature (1)..( 10): Result.006 file - promoters50/5773091
tgattttttc

SEQ ID NO: 200459 - DNA, 10 bp, Unknown
  misc_feature (1)..( 10): Result.006 file - promoters50/5773091
aaatttttta

SEQ ID NO: 200460 - DNA, 11 bp, Unknown
  misc_feature (1)..( 11): Result.006 file - promoters50/5773091
ctattttatta

SEQ ID NO: 200461 - DNA, 11 bp, Unknown
  misc_feature (1)..( 11): Result.006 file - promoters50/5773091
caaatttatta

SEQ ID NO: 200462 - DNA, 11 bp, Unknown
  misc_feature (1)..( 11): Result.006 file - promoters50/5773759
ggaatatatta

SEQ ID NO: 200463 - DNA, 12 bp, Unknown
  misc_feature (1)..( 12): Result.006 file - promoters50/5773759
tttagcaaaaag

SEQ ID NO: 200464 - DNA, 12 bp, Unknown
  misc_feature (1)..( 12): Result.006 file - promoters50/5773759
cttagcaataaa

SEQ ID NO: 200465 - DNA, 12 bp, Unknown
  misc_feature (1)..( 12): Result.006 file - promoters50/5773759
tttaacaataag

SEQ ID NO: 200466 - DNA, 8 bp, Unknown
  misc_feature (1)..( 8): Result.006 file - promoters50/5773759
atatttag

SEQ ID NO: 200467 - DNA, 8 bp, Unknown
  misc_feature (1)..( 8): Result.006 file - promoters50/5773759
ttatttag

SEQ ID NO: 200468 - DNA, 8 bp, Unknown
  misc_feature (1)..( 8): Result.006 file - promoters50/5773759
cttttttt

SEQ ID NO: 200469 - DNA, 8 bp, Unknown
  misc_feature (1)..( 8): Result.006 file - promoters50/5773759
aatggcaa

SEQ ID NO: 200470 - DNA, 8 bp, Unknown
  misc_feature (1)..( 8): Result.006 file - promoters50/5773759
aatcgcat

SEQ ID NO: 200471 - DNA, 8 bp, Unknown
  misc_feature (1)..( 8): Result.006 file - promoters50/5773772
tttcgcat

SEQ ID NO: 200472 - DNA, 9 bp, Unknown
  misc_feature (1)..( 9): Result.006 file - promoters50/5773772
tacattact

SEQ ID NO: 200473 - DNA, 10 bp, Unknown
  misc_feature (1)..( 10): Result.006 file - promoters50/5773772
ttacattctt

SEQ ID NO: 200474 - DNA, 10 bp, Unknown
  misc_feature (1)..( 10): Result.006 file - promoters50/5773772
ttatattgtg

SEQ ID NO: 200475 - DNA, 10 bp, Unknown
  misc_feature (1)..( 10): Result.006 file - promoters50/5773772
ctaaatataa

SEQ ID NO: 200476 - DNA, 10 bp, Unknown
  misc_feature (1)..( 10): Result.006 file - promoters50/5773772
tgaaatcata

SEQ ID NO: 200477 - DNA, 10 bp, Unknown
  misc_feature (1)..( 10): Result.006 file - promoters50/5773772
ttatatactg

SEQ ID NO: 200478 - DNA, 7 bp, Unknown
  misc_feature (1)..( 7): Result.006 file - promoters50/5773772
tttgatt

SEQ ID NO: 200479 - DNA, 7 bp, Unknown
  misc_feature (1)..( 7): Result.006 file - promoters50/5773772
gttgatt

SEQ ID NO: 200480 - DNA, 7 bp, Unknown
  misc_feature (1)..( 7): Result.006 file - promoters50/5773772
tttgata

SEQ ID NO: 200481 - DNA, 7 bp, Unknown
  misc_feature (1)..( 7): Result.006 file - promoters50/5773772
tttgatt

SEQ ID NO: 200482 - DNA, 7 bp, Unknown
  misc_feature (1)..( 7): Result.006 file - promoters50/5773772
cttgatt

SEQ ID NO: 200483 - DNA, 7 bp, Unknown
  misc_feature (1)..( 7): Result.006 file - promoters50/5773772
ttttatt

SEQ ID NO: 200484 - DNA, 9 bp, Unknown
  misc_feature (1)..( 9): Result.006 file - promoters50/5773772
cttttttta

SEQ ID NO: 200485 - DNA, 9 bp, Unknown
  misc_feature (1)..( 9): Result.006 file - promoters50/5773772
attttttta

SEQ ID NO: 200486 - DNA, 9 bp, Unknown
  misc_feature (1)..( 9): Result.006 file - promoters50/5773772
ctttgtttg

SEQ ID NO: 200487 - DNA, 9 bp, Unknown
  misc_feature (1)..( 9): Result.006 file - promoters50/5773772
gtttttttt

SEQ ID NO: 200488 - DNA, 9 bp, Unknown
  misc_feature (1)..( 9): Result.006 file - promoters50/5773772
atttttcag

SEQ ID NO: 200489 - DNA, 9 bp, Unknown
  misc_feature (1)..( 9): Result.006 file - promoters50/5774459
attttttgt

SEQ ID NO: 200490 - DNA, 11 bp, Unknown
  misc_feature (1)..( 11): Result.006 file - promoters50/5774459
cgaaatcgatc

SEQ ID NO: 200491 - DNA, 11 bp, Unknown
  misc_feature (1)..( 11): Result.006 file - promoters50/5774459
ataaatcaatc

SEQ ID NO: 200492 - DNA, 11 bp, Unknown
  misc_feature (1)..( 11): Result.006 file - promoters50/5774459
ataactcattt

SEQ ID NO: 200493 - DNA, 8 bp, Unknown
  misc_feature (1)..( 8): Result.006 file - promoters50/5774459
tgcaatgg

SEQ ID NO: 200494 - DNA, 8 bp, Unknown
  misc_feature (1)..( 8): Result.006 file - promoters50/5774459
tgcagtgg

SEQ ID NO: 200495 - DNA, 8 bp, Unknown
  misc_feature (1)..( 8): Result.006 file - promoters50/5774459
tgcagtca

SEQ ID NO: 200496 - DNA, 10 bp, Unknown
  misc_feature (1)..( 10): Result.006 file - promoters50/5774459
tgtgttgtag

SEQ ID NO: 200497 - DNA, 10 bp, Unknown
  misc_feature (1)..( 10): Result.006 file - promoters50/5774459
tgttttgtta

SEQ ID NO: 200498 - DNA, 10 bp, Unknown
  misc_feature (1)..( 10): Result.006 file - promoters50/5774545
gcttttatta

SEQ ID NO: 200499 - DNA, 7 bp, Unknown
  misc_feature (1)..( 7): Result.006 file - promoters50/5774545
ttatatc

SEQ ID NO: 200500 - DNA, 7 bp, Unknown
  misc_feature (1)..( 7): Result.006 file - promoters50/5774545
ttatata

SEQ ID NO: 200501 - DNA, 8 bp, Unknown
  misc_feature (1)..( 8): Result.006 file - promoters50/5774545
ctatgata

SEQ ID NO: 200502 - DNA, 8 bp, Unknown
  misc_feature (1)..( 8): Result.006 file - promoters50/5774545
aatataaa

SEQ ID NO: 200503 - DNA, 8 bp, Unknown
  misc_feature (1)..( 8): Result.006 file - promoters50/5774545
tttataaa

SEQ ID NO: 200504 - DNA, 8 bp, Unknown
  misc_feature (1)..( 8): Result.006 file - promoters50/5774545
tttctaag

SEQ ID NO: 200505 - DNA, 19 bp, Artificial Sequence
  oligo(dT)18 primer
ttttttttttttttttttv

SEQ ID NO: 200506 - DNA, 19 bp, Artificial Sequence
  oligo dTV
  misc_feature (19)..(19)
ttttttttttttttttttn

SEQ ID NO: 200507 - DNA, 50 bp, Artificial Sequence
  Reamplification primer 99G24
cgccagggttttcccagtcacgacacgactcactgatgagtcctgagtaa

SEQ ID NO: 200508 - DNA, 49 bp, Artificial Sequence
  Reamplification primer 99G20
agcggataacaatttcacacaggacacactggtatagactgcgtaccga

SEQ ID NO: 200509 - DNA, 16 bp, Artificial Sequence
  AD2 primer used for TAIL-PCR
  misc_feature (1)..(1): n is a, c, g, or t
  misc_feature (11)..(11): n is a, c, g, or t
ngtcgaswganawgaa

SEQ ID NO: 200510 - DNA, 23 bp, Artificial Sequence
  LB1 primer used for TAIL-PCR
gtttaactgcggctcaactgtct

SEQ ID NO: 200511 - DNA, 25 bp, Artificial Sequence
  LB2 primer used for TAIL-PCR
cccatagacccttaccgctttagtt

SEQ ID NO: 200512 - DNA, 25 bp, Artificial Sequence
  LB3 primer used for TAIL-PCR
gaaagaaaaagaggtataactggta
